(19) United States
(12) Patent Application Publication
(10) Pub. No.: US 2022/0348658 A1
(43) Pub. Date: Nov. 3, 2022

(54) ANTI-T CELL ANTIGEN-BINDING MOLECULE TO BE USED IN COMBINATION WITH CYTOKINE INHIBITOR

(71) Applicant: Chugai Seiyaku Kabushiki Kaisha, Tokyo (JP)

(72) Inventors: Takahiro ISHIGURO, Tokyo (JP); Shohei KISHSHITA, Tokyo (JP); Mikiko NAKAMURA, Tokyo (JP); Roland Kaneo MORLEY, Tokyo (JP)

(21) Appl. No.: 17/616,373

(22) PCT Filed: Jun. 10, 2020
(86) PCT No.: PCT/JP2020/022771

§ 371 Date: Dec. 3, 2021

(30) Foreign Application Priority Data
Jun. 10, 2019 (JP) 2019-107894
Jul. 3, 2019 (JP) 2019-124364

(51) Int. Cl. C07K 16/28; A61K 31/573; A61P 35/00; A61K 39/395

(52) U.S. Cl. CPC C07K 16/2809; C07K 16/2866; A61K 31/573; A61P 35/00; A61K 39/3955; A61K 2039/545

(57) ABSTRACT

The present disclosure provides combination therapies with an anti-T cell antigen-binding molecule and a cytokine inhibitor. Antibodies that recruit T cells as effector cells into tumor tissues are called T cell redirecting antibodies, and are known as means for treating tumors. On the other hand, when systemic cytokine production is stimulated by binding of antibodies to T cells, it is feared that this systemic action will lead to aberrations such as CRS. The present disclosure provides means for alleviating systemic cytokine production, and will enable safer use of anti-T cell antigen-binding molecules in tumor treatment.

### TECHNICAL FIELD

[0001] The present disclosure relates to anti-T cell antigen-binding molecules for use in combination with cytokine inhibitors. Furthermore, the present disclosure relates to pharmaceutical compositions and methods for preventing, alleviating, or treating adverse reactions caused by cytokine production associated with administration of anti-T cell antigen-binding molecules.

### BACKGROUND ART

[0002] Antibodies are drawing attention as pharmaceuticals because of their high stability in plasma and few adverse reactions (NPL 1 and NPL 2). Antibodies are known to induce not only an antigen-binding action, an agonistic action, and an antagonistic action, but also effector cell-mediated cytotoxic activities (also called effector functions) such as antibody-dependent cytotoxicity (ADCC), antibody dependent cell phagocytosis (ADCP), and complement-dependent cytotoxicity (CDC), and exhibit antitumor effects against cancer cells (NPL 3). A number of therapeutic antibodies showing excellent anti-tumor effects have been developed as pharmaceuticals aimed for cancer treatment (NPL 4); and while existing therapeutic antibodies have shown excellent actions, the therapeutic outcome achieved by administration of these antibodies is still not satisfactory.

[0003] Antibodies (bispecific antibodies) that bind to two or more types of antigens with one molecule are being studied as molecules that inhibit multiple targets. If all antigens recognized by a bispecific antibody are antigens specifically expressed in cancer, the bispecific antibody exhibits cytotoxic activity to cancer cells when it binds to any of the antigens; therefore, in comparison to a conventional antibody pharmaceutical that recognizes one antigen, a more efficient antitumor effect can be expected from such an antibody.

[0004] As one of the bispecific antibodies, a T cell-redirecting antibody, which is an antibody whose mechanisms of antitumor effect is cytotoxicity mediated by the recruitment of T cells as effector cells, has been known from the 1980s (NPLs 5, 6, and 7). Unlike antibodies that employ ADCC, which is mediated by the recruitment of NK cells or macrophages as effector cells, as the mechanism for their antitumor effects, a T cell-redirecting antibody is a bispecific antibody comprising an antibody against any one of the subunits constituting the T-cell receptor (TCR) complex on T cells, in particular, an antibody that binds to the CD3 epsilon chain; and an antibody that binds to an antigen on the target cancer cell. T cells come close to cancer cells via simultaneous binding of the T cell-redirecting antibody to the CD3 epsilon chain and a cancer antigen. As a result, antitumor effects against cancer cells are considered to be exerted through the cytotoxic activity possessed by T cells. For example, in recent years, novel T cell-redirecting antibodies have been provided, which are antibodies whose two Fabs respectively bind to a cancer antigen (GPC3) and the CD3ε chain expressed on T cells, and have an Fc region with reduced FcγR-binding activity (PTL 1 and 2).

[0005] On the other hand, occurrence of toxicity associated with exertion of high antitumor activity by the T cell-redirecting antibody, for example, development of cytokine release syndrome (CRS), has been reported (NPL 8).

### CITATION LIST

### Patent Literature

[0006] [PTL 1] WO2012/073985
[0007] [PTL 2] WO2016/047722

### Non-Patent Literature

[0008] [NPL 1] Nat. Biotechnol. (2005) 23, 1073-1078
[0009] [NPL 2] Eur J Pharm Biopharm. (2005) 59 (3), 389-396
[0010] [NPL 3] Drug Des Devel Ther (2009) 3, 7-16
[0011] [NPL 4] Clin Cancer Res. (2010) 16 (1), 11-20
[0012] [NPL 5] Nature (1985) 314 (6012), 628-31
[0013] [NPL 6] Int J Cancer (1988) 41 (4), 609-15.
[0014] [NPL 7] Proc Natl Acad Sci USA (1986) 83 (5), 1453-7
[0015] [NPL 8] Cancer J. 2014 March-April; 20(2): 119-122.

### SUMMARY OF INVENTION

### Technical Problem

[0016] In a non-limiting embodiment, the present disclosure relates to combination therapies involving an anti-T cell antigen-binding molecule and a cytokine inhibitor, and a pharmaceutical composition and such for use in the combination therapies.

### Solution to Problem

[0017] In a non-limiting embodiment, the present inventors found that administration of a cytokine inhibitor can prevent, alleviate, or treat cytokine release syndrome (CRS) associated with administration of an anti-T cell antigen-binding molecule in an individual.

[0018] In a non-limiting embodiment, the present disclosure relates to the following:
[0019] (A1) a pharmaceutical composition comprising an anti-T cell antigen-binding molecule, wherein the pharmaceutical composition is for use in its combination therapy with a cytokine inhibitor;
[0020] (A1-1) the pharmaceutical composition of (A1), wherein the cytokine inhibitor is administered before, simultaneously with, or after administration of the pharmaceutical composition;
[0021] (A1-2) the pharmaceutical composition of (A1) or (A1-1), wherein the cytokine inhibitor is administered before or simultaneously with the administration of the pharmaceutical composition;
[0022] (A1-3) the pharmaceutical composition of any one of (A1) to (A1-2), wherein the cytokine inhibitor is administered 6 days, 5 days, 4 days, 3 days, 2 days, or 1 day before the administration of the pharmaceutical composition, or on the same day as but before said administration;
[0023] (A1-4) the pharmaceutical composition of any one of (A1) to (A1-3), wherein the cytokine inhibitor is further administered on the same day as, or 1 day, 2 days, 3 days, 4 days, 5 days, or 6 days after the administration of the pharmaceutical composition;
[0024] (A1-5) the pharmaceutical composition of any one of (A1) to (A1-4), wherein the cytokine inhibitor is further administered when CRS or signs of CRS develop after the administration of the pharmaceutical composition;
[0025] (A1-6) the pharmaceutical composition of (A1-5), wherein the CRS is CRS in Grade 2 or higher or Grade 3 or higher;
[0026] (A1-7) the pharmaceutical composition of (A1) or (A1-1), wherein the cytokine inhibitor is administered after the administration of the pharmaceutical composition;
[0027] (A1-8) the pharmaceutical composition of (A1) or (A1-7), wherein the cytokine inhibitor is administered when CRS or signs of CRS develop after the administration of the pharmaceutical composition;
[0028] (A1-9) the pharmaceutical composition of (A1-7) or (A1-8), wherein the CRS is CRS in Grade 2 or higher or Grade 3 or higher;
[0029] (A1-10) the pharmaceutical composition of any one of (A1) to (A1-9), wherein the cytokine inhibitor is an inhibitor of one or more cytokines selected from IL-1β, IL-2, IL-4, IL-5, IL-6, IL-8, IL-10, IL-12, IL-13, IL-15, IL-17, IL-1Ra, IL-2R, IFN-α, IFN-γ, MIP-1α, MIP-1β, MCP-1, TNFα, GM-CSF, G-CSF, CXCL9, CXCL10, CXCR factor, VEGF, RANTES, eotaxin, EGF, HGF, FGF-β, CD30, CD30L, CD40, CD40L, ferritin, and RAGE;
[0030] (A1-11) the pharmaceutical composition of any one of (A1) to (A1-10), wherein the cytokine inhibitor is an anti-IL6R antibody;
[0031] (A1-12) the pharmaceutical composition of any one of (A1) to (A1-11), wherein the cytokine inhibitor is Tocilizumab, and wherein Tocilizumab is administered at 8 mg/kg or less per dose for a patient weighing 30 kg or more and at 12 mg/kg or less per dose for a patient weighing less than 30 kg;
[0032] (A1-13) the pharmaceutical composition of any one of (A1) to (A1-12), wherein a corticosteroid is not administered before or simultaneously with the administration of the pharmaceutical composition;
[0033] (A1-14) the pharmaceutical composition of any one of (A1) to (A1-12), wherein a corticosteroid is further administered before, simultaneously with, or after the administration of the pharmaceutical composition;
[0034] (A1-15) the pharmaceutical composition of (A1-13) or (A1-14), wherein the corticosteroid is dexamethasone, a pharmaceutically acceptable salt thereof, or a derivative thereof;
[0035] (A1-16) the pharmaceutical composition of any one of (A1) to (A1-15), wherein the anti-T cell antigen-binding molecule is a bispecific antigen-binding molecule comprising:
   [0036] (1) a domain comprising an antibody variable region having T cell receptor complex-binding activity; and
   [0037] (2) a domain comprising an antibody variable region having cancer antigen-binding activity;
[0038] (A1-17) the pharmaceutical composition of any one of (A1) to (A1-16), wherein the anti-T cell antigen-binding molecule is a bispecific antibody comprising:
   [0039] (1) a domain comprising an antibody variable region having T cell receptor complex-binding activity;
   [0040] (2) a domain comprising an antibody variable region having glypican 3-binding activity; and
   [0041] (3) a domain comprising an Fc region with reduced binding activity to an Fcγ receptor;
[0042] (A1-18) the pharmaceutical composition of any one of (A1) to (A1-17), which is for treatment of cancer; and
[0043] (A1-19) the pharmaceutical composition of any one of (A1) to (A1-18), which is for treating cancer while preventing or alleviating cytokine release syndrome associated with administration of the anti-T cell antigen-binding molecule.

[0044] The present disclosure also provides administration of an anti-T cell antigen-binding molecule that is accompanied with pre-administration of a cytokine inhibitor, which includes each of the following embodiments (when pre-administration of a cytokine inhibitor is performed for each administration of an anti-T cell antigen-binding molecule):
[0045] (A2) a pharmaceutical composition comprising an anti-T cell antigen-binding molecule, wherein the pharmaceutical composition is for use in its combination therapy with a cytokine inhibitor, wherein in the combination therapy,
   [0046] (i) the pharmaceutical composition is administered repeatedly, and
   [0047] (ii) the cytokine inhibitor is administered before or simultaneously with each administration of the pharmaceutical composition;
[0048] (A2-1) the pharmaceutical composition of (A2), wherein the pharmaceutical composition is administered repeatedly at the same dose;
[0049] (A2-2) the pharmaceutical composition of (A2) or (A2-1), wherein the pharmaceutical composition is administered repeatedly at intervals of once every week, once every 2 weeks, or once every 3 weeks;
[0050] (A2-3) the pharmaceutical composition of any one of (A2) to (A2-2), wherein the cytokine inhibitor is administered 6 days, 5 days, 4 days, 3 days, 2 days, or 1 day before each administration of the pharmaceutical composition, or on the same day as but before said each administration;
[0051] (A2-4) the pharmaceutical composition of any one of (A2) to (A2-3), wherein the cytokine inhibitor is further administered on the same day as, or 1 day, 2 days, 3 days, 4 days, 5 days, or 6 days after the administration of the pharmaceutical composition;
[0052] (A2-5) the pharmaceutical composition of any one of (A2) to (A2-4), wherein the cytokine inhibitor is further administered when CRS or signs of CRS develop after the administration of the pharmaceutical composition;
[0053] (A2-6) the pharmaceutical composition of (A2-5), wherein the CRS is CRS in Grade 2 or higher or Grade 3 or higher;
[0054] (A2-7) the pharmaceutical composition of any one of (A2) to (A2-6), wherein the cytokine inhibitor is an inhibitor of one or more cytokines selected from IL-1β, IL-2, IL-4, IL-5, IL-6, IL-8, IL-10, IL-12, IL-13, IL-15, IL-17, IL-1Ra, IL-2R, IFN-α, IFN-γ, MIP-1α, MIP-1β, MCP-1, TNFα, GM-CSF, G-CSF, CXCL9, CXCL10, CXCR factor, VEGF, RANTES, eotaxin, EGF, HGF, FGF-β, CD30, CD30L, CD40, CD40L, ferritin, and RAGE;
[0055] (A2-8) the pharmaceutical composition of any one of (A2) to (A2-7), wherein the cytokine inhibitor is an anti-IL6R antibody;
[0056] (A2-9) the pharmaceutical composition of any one of (A2) to (A2-8), wherein the cytokine inhibitor is Tocilizumab, and wherein Tocilizumab is administered at 8 mg/kg or less per dose for a patient weighing 30 kg or more and at 12 mg/kg or less per dose for a patient weighing less than 30 kg;
[0057] (A2-10) the pharmaceutical composition of any one of (A2) to (A2-9), wherein a corticosteroid is not administered before or simultaneously with the administration of the pharmaceutical composition;
[0058] (A2-11) the pharmaceutical composition of any one of (A2) to (A2-9), wherein a corticosteroid is further administered before, simultaneously with, or after the administration of the pharmaceutical composition;
[0059] (A2-12) the pharmaceutical composition of (A2-10) or (A2-11), wherein the corticosteroid is dexamethasone, a pharmaceutically acceptable salt thereof, or a derivative thereof;
[0060] (A2-13) the pharmaceutical composition of any one of (A2) to (A2-12), wherein the anti-T cell antigen-binding molecule is a bispecific antigen-binding molecule comprising:
   [0061] (1) a domain comprising an antibody variable region having T cell receptor complex-binding activity; and
   [0062] (2) a domain comprising an antibody variable region having cancer antigen-binding activity;
[0063] (A2-14) the pharmaceutical composition of any one of (A2) to (A2-13), wherein the anti-T cell antigen-binding molecule is a bispecific antibody comprising:
   [0064] (1) a domain comprising an antibody variable region having T cell receptor complex-binding activity;
   [0065] (2) a domain comprising an antibody variable region having glypican 3-binding activity; and
   [0066] (3) a domain comprising an Fc region with reduced binding activity to an Fcγ receptor;
[0067] (A2-15) the pharmaceutical composition of any one of (A2) to (A2-14), which is for treatment of cancer; and
[0068] (A2-16) the pharmaceutical composition of any one of (A2) to (A2-15), which is for treating cancer while preventing or alleviating cytokine release syndrome associated with administration of the anti-T cell antigen-binding molecule.

[0069] Alternatively, the present disclosure provides each of the following embodiments (when pre-administration of a cytokine inhibitor is performed for the first or multiple administrations of an anti-T cell antigen-binding molecule):
[0070] (A3) a pharmaceutical composition comprising an anti-T cell antigen-binding molecule, wherein the pharmaceutical composition is for use in its combination therapy with a cytokine inhibitor, wherein in the combination therapy,
   [0071] (i) the pharmaceutical composition is administered repeatedly, and
   [0072] (ii) the cytokine inhibitor is administered before or simultaneously with the first or each administration of the first to second, the first to third, the first to fourth, or the first to fifth administrations of the pharmaceutical composition;
[0073] (A3-1) the pharmaceutical composition of (A3), wherein the pharmaceutical composition is administered repeatedly at the same dose;
[0074] (A3-2) the pharmaceutical composition of (A3) or (A3-1), wherein the pharmaceutical composition is administered repeatedly at intervals of once every week, once every 2 weeks, or once every 3 weeks;
[0075] (A3-3) the pharmaceutical composition of any one of (A3) to (A3-2), wherein the cytokine inhibitor is administered 6 days, 5 days, 4 days, 3 days, 2 days, or 1 day before the first, or each administration of the first to second, the first to third, the first to fourth, or the first to fifth administrations of the pharmaceutical composition, or on the same day as but before said first or each administration;
[0076] (A3-4) the pharmaceutical composition of any one of (A3) to (A3-3), wherein the cytokine inhibitor is further administered on the same day as, or 1 day, 2 days, 3 days, 4 days, 5 days, or 6 days after the first, the first to second, the first to third, the first to fourth, or the first to fifth administrations of the pharmaceutical composition;
[0077] (A3-5) the pharmaceutical composition of any one of (A3) to (A3-4), wherein the cytokine inhibitor is further administered when CRS or signs of CRS develop after the administration of the pharmaceutical composition;
[0078] (A3-6) the pharmaceutical composition of (A3-5), wherein the CRS is CRS in Grade 2 or higher or Grade 3 or higher;
[0079] (A3-7) the pharmaceutical composition of any one of (A3) to (A3-6), wherein the cytokine inhibitor is an inhibitor of one or more cytokines selected from IL-1β, IL-2, IL-4, IL-5, IL-6, IL-8, IL-10, IL-12, IL-13, IL-15, IL-17, IL-1Ra, IL-2R, IFN-α, IFN-γ, MIP-1α, MIP-1β, MCP-1, TNFα, GM-CSF, G-CSF, CXCL9, CXCL10, CXCR factor, VEGF, RANTES, eotaxin, EGF, HGF, FGF-β, CD30, CD30L, CD40, CD40L, ferritin, and RAGE;
[0080] (A3-8) the pharmaceutical composition of any one of (A3) to (A3-7), wherein the cytokine inhibitor is an anti-IL6R antibody;
[0081] (A3-9) the pharmaceutical composition of any one of (A3) to (A3-8), wherein the cytokine inhibitor is Tocilizumab, and wherein Tocilizumab is administered at 8 mg/kg or less per dose for a patient weighing 30 kg or more and at 12 mg/kg or less per dose for a patient weighing less than 30 kg;
[0082] (A3-10) the pharmaceutical composition of any one of (A3) to (A3-9), wherein a corticosteroid is not administered before or simultaneously with the administration of the pharmaceutical composition;
[0083] (A3-11) the pharmaceutical composition of any one of (A3) to (A3-9), wherein a corticosteroid is further administered before, simultaneously with, or after the administration of the pharmaceutical composition;
[0084] (A3-12) the pharmaceutical composition of (A3-10) or (A3-11), wherein the corticosteroid is dexamethasone, a pharmaceutically acceptable salt thereof, or a derivative thereof;
[0085] (A3-13) the pharmaceutical composition of any one of (A3) to (A3-12), wherein the anti-T cell antigen-binding molecule is a bispecific antigen-binding molecule comprising:
   [0086] (1) a domain comprising an antibody variable region having T cell receptor complex-binding activity; and
   [0087] (2) a domain comprising an antibody variable region having cancer antigen-binding activity;
[0088] (A3-14) the pharmaceutical composition of any one of (A3) to (A3-13), wherein the anti-T cell antigen-binding molecule is a bispecific antibody comprising:
   [0089] (1) a domain comprising an antibody variable region having T cell receptor complex-binding activity;
   [0090] (2) a domain comprising an antibody variable region having glypican 3-binding activity; and
   [0091] (3) a domain comprising an Fc region with reduced binding activity to an Fcγ receptor;
[0092] (A3-15) the pharmaceutical composition of any one of (A3) to (A3-14), which is for treatment of cancer; and
[0093] (A3-16) the pharmaceutical composition of any one of (A3) to (A3-15), which is for treating cancer while preventing or alleviating cytokine release syndrome associated with administration of the anti-T cell antigen-binding molecule.

[0094] Alternatively, the present disclosure provides each of the following embodiments (when pre-administration of a cytokine inhibitor is performed in every dosing cycle of an anti-T cell antigen-binding molecule):
[0095] (A4) a pharmaceutical composition comprising an anti-T cell antigen-binding molecule, wherein the pharmaceutical composition is for use in its combination therapy with a cytokine inhibitor, wherein in the combination therapy,
   [0096] (i) the pharmaceutical composition is administered repeatedly in dosing cycles where 2, 3, 4, or 5 administrations constitute one cycle, and
   [0097] (ii) the cytokine inhibitor is administered before or simultaneously with the first administration of the pharmaceutical composition in each of the dosing cycles;
[0098] (A4-1) the pharmaceutical composition of (A4), wherein the pharmaceutical composition is administered repeatedly at the same dose;
[0099] (A4-2) the pharmaceutical composition of (A4) or (A4-1), wherein the pharmaceutical composition is administered repeatedly at intervals of once every week, once every 2 weeks, or once every 3 weeks;
[0100] (A4-3) the pharmaceutical composition of any one of (A4) to (A4-2), wherein the cytokine inhibitor is administered 6 days, 5 days, 4 days, 3 days, 2 days, or 1 day before the first administration of the pharmaceutical composition in each of the dosing cycles, or on the same day as but before the said first administration;
[0101] (A4-4) the pharmaceutical composition of any one of (A4) to (A4-3), wherein the cytokine inhibitor is further administered on the same day as, or 1 day, 2 days, 3 days, 4 days, 5 days, or 6 days after the first administration of the pharmaceutical composition in each of the dosing cycles;
[0102] (A4-5) the pharmaceutical composition of any one of (A4) to (A4-4), wherein the cytokine inhibitor is further administered when CRS or signs of CRS develop after the administration of the pharmaceutical composition;
[0103] (A4-6) the pharmaceutical composition of (A4-5), wherein the CRS is CRS in Grade 2 or higher or Grade 3 or higher;
[0104] (A4-7) the pharmaceutical composition of any one of (A4) to (A4-6), wherein the cytokine inhibitor is an inhibitor of one or more cytokines selected from IL-1β, IL-2, IL-4, IL-5, IL-6, IL-8, IL-10, IL-12, IL-13, IL-15, IL-17, IL-1Ra, IL-2R, IFN-α, IFN-γ, MIP-1α, MIP-1β, MCP-1, TNFα, GM-CSF, G-CSF, CXCL9, CXCL10, CXCR factor, VEGF, RANTES, eotaxin, EGF, HGF, FGF-β, CD30, CD30L, CD40, CD40L, ferritin, and RAGE;
[0105] (A4-8) the pharmaceutical composition of any one of (A4) to (A4-7), wherein the cytokine inhibitor is an anti-IL6R antibody;
[0106] (A4-9) the pharmaceutical composition of any one of (A4) to (A4-8), wherein the cytokine inhibitor is Tocilizumab, and wherein Tocilizumab is administered at 8 mg/kg or less per dose for a patient weighing 30 kg or more and at 12 mg/kg or less per dose for a patient weighing less than 30 kg;
[0107] (A4-10) the pharmaceutical composition of any one of (A4) to (A4-9), wherein a corticosteroid is not administered before or simultaneously with the administration of the pharmaceutical composition;
[0108] (A4-11) the pharmaceutical composition of any one of (A4) to (A4-9), wherein a corticosteroid is further administered before, simultaneously with, or after the administration of the pharmaceutical composition;
[0109] (A4-12) the pharmaceutical composition of (A4-10) or (A4-11), wherein the corticosteroid is dexamethasone, a pharmaceutically acceptable salt thereof, or a derivative thereof;
[0110] (A4-13) the pharmaceutical composition of any one of (A4) to (A4-12), wherein the anti-T cell antigen-binding molecule is a bispecific antigen-binding molecule comprising:
   [0111] (1) a domain comprising an antibody variable region having T cell receptor complex-binding activity; and
   [0112] (2) a domain comprising an antibody variable region having cancer antigen-binding activity;
[0113] (A4-14) the pharmaceutical composition of any one of (A4) to (A4-13), wherein the anti-T cell antigen-binding molecule is a bispecific antibody comprising:
   [0114] (1) a domain comprising an antibody variable region having T cell receptor complex-binding activity;
   [0115] (2) a domain comprising an antibody variable region having glypican 3-binding activity; and
   [0116] (3) a domain comprising an Fc region with reduced binding activity to an Fcγ receptor;
[0117] (A4-15) the pharmaceutical composition of any one of (A4) to (A4-14), which is for treatment of cancer; and
[0118] (A4-16) the pharmaceutical composition of any one of (A4) to (A4-15), which is for treating cancer while preventing or alleviating cytokine release syndrome associated with administration of the anti-T cell antigen-binding molecule.

[0119] Alternatively, the present disclosure comprises each of the following embodiments (when pre-administration of a cytokine inhibitor is performed in every dosing cycle of an anti-T cell antigen-binding molecule):
[0120] (A5) a pharmaceutical composition comprising an anti-T cell antigen-binding molecule, wherein the pharmaceutical composition is for use in its combination therapy with a cytokine inhibitor, wherein in the combination therapy,
   [0121] (i) the pharmaceutical composition is administered repeatedly in dosing cycles where 2, 3, 4, or 5 administrations constitute one cycle, and
   [0122] (ii) (a) the cytokine inhibitor is administered before or simultaneously with each administration of the pharmaceutical composition in the first dosing cycle, and (b) the cytokine inhibitor is administered before or simultaneously with the first administration of the pharmaceutical composition in each of the second and subsequent dosing cycles;
[0123] (A5-1) the pharmaceutical composition of (A5), wherein the pharmaceutical composition is administered repeatedly at the same dose;
[0124] (A5-2) the pharmaceutical composition of (A5) or (A5-1), wherein the pharmaceutical composition is administered repeatedly at intervals of once every week, once every 2 weeks, or once every 3 weeks;
[0125] (A5-3) the pharmaceutical composition of any one of (A5) to (A5-2), wherein the cytokine inhibitor is administered
   [0126] (a) 6 days, 5 days, 4 days, 3 days, 2 days, or 1 day before each administration of the pharmaceutical composition in the first dosing cycle, or on the same day as but before said each administration, and
   [0127] (b) 6 days, 5 days, 4 days, 3 days, 2 days, or 1 day before the first administration of the pharmaceutical composition in each of the second and subsequent dosing cycles, or on the same day as but before said first administration;
[0128] (A5-4) the pharmaceutical composition of any one of (A5) to (A5-3), wherein the cytokine inhibitor is further administered
   [0129] (a) on the same day as, or 1 day, 2 days, 3 days, 4 days, 5 days, or 6 days after each administration of the pharmaceutical composition in the first dosing cycle, and
   [0130] (b) on the same day as, or 1 day, 2 days, 3 days, 4 days, 5 days, or 6 days after the first administration of the pharmaceutical composition in each of the second and subsequent dosing cycles;
[0131] (A5-5) the pharmaceutical composition of any one of (A5) to (A5-4), wherein the cytokine inhibitor is further administered when CRS or signs of CRS develop after the administration of the pharmaceutical composition;
[0132] (A5-6) the pharmaceutical composition of (A5-5), wherein the CRS is CRS in Grade 2 or higher or Grade 3 or higher;
[0133] (A5-7) the pharmaceutical composition of any one of (A5) to (A5-6), wherein the cytokine inhibitor is an inhibitor of one or more cytokines selected from IL-1β, IL-2, IL-4, IL-5, IL-6, IL-8, IL-10, IL-12, IL-13, IL-15, IL-17, IL-1Ra, IL-2R, IFN-α, IFN-γ, MIP-1α, MIP-1β, MCP-1, TNFα, GM-CSF, G-CSF, CXCL9, CXCL10, CXCR factor, VEGF, RANTES, eotaxin, EGF, HGF, FGF-β, CD30, CD30L, CD40, CD40L, ferritin, and RAGE;
[0134] (A5-8) the pharmaceutical composition of any one of (A5) to (A5-7), wherein the cytokine inhibitor is an anti-IL6R antibody;
[0135] (A5-9) the pharmaceutical composition of any one of (A5) to (A5-8), wherein the cytokine inhibitor is Tocilizumab, and wherein Tocilizumab is administered at 8 mg/kg or less per dose for a patient weighing 30 kg or more and at 12 mg/kg or less per dose for a patient weighing less than 30 kg;
[0136] (A5-10) the pharmaceutical composition of any one of (A5) to (A5-9), wherein a corticosteroid is not administered before or simultaneously with the administration of the pharmaceutical composition;
[0137] (A5-11) the pharmaceutical composition of any one of (A5) to (A5-9), wherein a corticosteroid is further administered before, simultaneously with, or after the administration of the pharmaceutical composition;
[0138] (A5-12) the pharmaceutical composition of (A5-10) or (A5-11), wherein the corticosteroid is dexamethasone, a pharmaceutically acceptable salt thereof, or a derivative thereof;
[0139] (A5-13) the pharmaceutical composition of any one of (A5) to (A5-12), wherein the anti-T cell antigen-binding molecule is a bispecific antigen-binding molecule comprising:
   [0140] (1) a domain comprising an antibody variable region having T cell receptor complex-binding activity; and
   [0141] (2) a domain comprising an antibody variable region having cancer antigen-binding activity;
[0142] (A5-14) the pharmaceutical composition of any one of (A5) to (A5-13), wherein the anti-T cell antigen-binding molecule is a bispecific antibody comprising:
   [0143] (1) a domain comprising an antibody variable region having T cell receptor complex-binding activity;
   [0144] (2) a domain comprising an antibody variable region having glypican 3-binding activity; and
   [0145] (3) a domain comprising an Fc region with reduced binding activity to an Fcγ receptor;
[0146] (A5-15) the pharmaceutical composition of any one of (A5) to (A5-14), which is for treatment of cancer; and
[0147] (A5-16) the pharmaceutical composition of any one of (A5) to (A5-15), which is for treating cancer while preventing or alleviating cytokine release syndrome associated with administration of the anti-T cell antigen-binding molecule.

[0148] Furthermore, the present disclosure relates to administration of an anti-T cell antigen-binding molecule that is accompanied with pre-administration of a cytokine inhibitor, which comprises the following embodiments (when pre-administration of a cytokine inhibitor is performed for each administration of an anti-T cell antigen-binding molecule, in a regimen comprising a step-up dosing period and a subsequent maintenance dosing period):
[0149] (A6) a pharmaceutical composition comprising an anti-T cell antigen-binding molecule, wherein the pharmaceutical composition is for use in its combination therapy with a cytokine inhibitor, wherein in the combination therapy
   [0150] (i) a step-up dosing period and a subsequent maintenance dosing period are comprised for the pharmaceutical composition and
   [0151] (ii) the cytokine inhibitor is administered before or simultaneously with each administration of the pharmaceutical composition during the step-up dosing period and the maintenance dosing period;
[0152] (A6-1) the pharmaceutical composition of (A6), wherein the dose of the pharmaceutical composition is increased stepwise during the step-up dosing period;
[0153] (A6-2) the pharmaceutical composition of (A6) or (A6-1), wherein the pharmaceutical composition is administered twice, 3 times, 4 times, or 5 times during the step-up dosing period;
[0154] (A6-3) the pharmaceutical composition of any one of (A6) to (A6-2), wherein the pharmaceutical composition is administered at intervals of once every week, once every 2 weeks, or once every 3 weeks during the step-up dosing period;
[0155] (A6-4) the pharmaceutical composition of any one of (A6) to (A6-3), wherein the pharmaceutical composition is administered repeatedly at the same dose during the maintenance dosing period;
[0156] (A6-5) the pharmaceutical composition of any one of (A6) to (A6-4), wherein the pharmaceutical composition is administered repeatedly at intervals of once every week, once every 2 weeks, or once every 3 weeks during the maintenance dosing period;
[0157] (A6-6) the pharmaceutical composition of any one of (A6) to (A6-5), wherein the cytokine inhibitor is administered 6 days, 5 days, 4 days, 3 days, 2 days, or 1 day before each administration of the pharmaceutical composition during the step-up dosing period and the maintenance dosing period, or on the same day as but before said each administration;
[0158] (A6-7) the pharmaceutical composition of any one of (A6) to (A6-6), wherein the cytokine inhibitor is further administered on the same day as, or 1 day, 2 days, 3 days, 4 days, 5 days, or 6 days after each administration of the pharmaceutical composition during the step-up dosing period and the maintenance dosing period;
[0159] (A6-8) the pharmaceutical composition of any one of (A6) to (A6-7), wherein the cytokine inhibitor is further administered when CRS or signs of CRS develop after the administration of the anti-T cell antigen-binding molecule;
[0160] (A6-9) the pharmaceutical composition of (A6-8), wherein the CRS is CRS in Grade 2 or higher or Grade 3 or higher;
[0161] (A6-10) the pharmaceutical composition of any one of (A6) to (A6-9), wherein the cytokine inhibitor is an inhibitor of one or more cytokines selected from IL-1β, IL-2, IL-4, IL-5, IL-6, IL-8, IL-10, IL-12, IL-13, IL-15, IL-17, IL-1Ra, IL-2R, IFN-α, IFN-γ, MIP-1α, MIP-1β, MCP-1, TNFα, GM-CSF, G-CSF, CXCL9, CXCL10, CXCR factor, VEGF, RANTES, eotaxin, EGF, HGF, FGF-β, CD30, CD30L, CD40, CD40L, ferritin, and RAGE;
[0162] (A6-11) the pharmaceutical composition of any one of (A6) to (A6-10), wherein the cytokine inhibitor is an anti-IL6R antibody;
[0163] (A6-12) the pharmaceutical composition of any one of (A6) to (A6-11), wherein the cytokine inhibitor is Tocilizumab, and wherein Tocilizumab is administered at 8 mg/kg or less per dose for a patient weighing 30 kg or more and at 12 mg/kg or less per dose for a patient weighing less than 30 kg;
[0164] (A6-13) the pharmaceutical composition of any one of (A6) to (A6-12), wherein a corticosteroid is not administered before or simultaneously with the administration of the pharmaceutical composition;
[0165] (A6-14) the pharmaceutical composition of any one of (A6) to (A6-12), wherein a corticosteroid is further administered before, simultaneously with, or after the administration of the pharmaceutical composition;
[0166] (A6-15) the pharmaceutical composition of (A6-13) or (A6-14), wherein the corticosteroid is dexamethasone, a pharmaceutically acceptable salt thereof, or a derivative thereof;
[0167] (A6-16) the pharmaceutical composition of any one of (A6) to (A6-15), wherein the anti-T cell antigen-binding molecule is a bispecific antigen-binding molecule comprising:
   [0168] (1) a domain comprising an antibody variable region having T cell receptor complex-binding activity; and
   [0169] (2) a domain comprising an antibody variable region having cancer antigen-binding activity;
[0170] (A6-17) the pharmaceutical composition of any one of (A6) to (A6-16), wherein the anti-T cell antigen-binding molecule is a bispecific antibody comprising:
   [0171] (1) a domain comprising an antibody variable region having T cell receptor complex-binding activity;
   [0172] (2) a domain comprising an antibody variable region having glypican 3-binding activity; and
   [0173] (3) a domain comprising an Fc region with reduced binding activity to an Fcγ receptor;
[0174] (A6-18) the pharmaceutical composition of any one of (A6) to (A6-17), which is for treatment of cancer; and
[0175] (A6-19) the pharmaceutical composition of any one of (A6) to (A6-18), which is for treating cancer while preventing or alleviating cytokine release syndrome associated with administration of the anti-T cell antigen-binding molecule.

[0176] Furthermore, the present disclosure relates to each of the following embodiments (when, in a regimen comprising a step-up dosing period and a subsequent maintenance dosing period, pre-administration of a cytokine inhibitor is performed for administration of an anti-T cell antigen-binding molecule during the step-up dosing period):
[0177] (A7) a pharmaceutical composition comprising an anti-T cell antigen-binding molecule, wherein the pharmaceutical composition is for use in its combination therapy with a cytokine inhibitor, wherein in the combination therapy
   [0178] (i) a step-up dosing period and a subsequent maintenance dosing period are comprised for the pharmaceutical composition, and
   [0179] (ii) the cytokine inhibitor is administered before or simultaneously with each administration of the pharmaceutical composition during the step-up dosing period;
[0180] (A7-1) the pharmaceutical composition of (A7), wherein the dose of the pharmaceutical composition is increased stepwise during the step-up dosing period;
[0181] (A7-2) the pharmaceutical composition of (A7) or (A7-1), wherein the pharmaceutical composition is administered twice, 3 times, 4 times, or 5 times during the step-up dosing period;
[0182] (A7-3) the pharmaceutical composition of any one of (A7) to (A7-2), wherein the pharmaceutical composition is administered at intervals of once every week, once every 2 weeks, or once every 3 weeks during the step-up dosing period;
[0183] (A7-4) the pharmaceutical composition of any one of (A7) to (A7-3), wherein the pharmaceutical composition is administered repeatedly at the same dose during the maintenance dosing period;
[0184] (A7-5) the pharmaceutical composition of any one of (A7) to (A7-4), wherein the pharmaceutical composition is administered repeatedly at intervals of once every week, once every 2 weeks, or once every 3 weeks during the maintenance dosing period;
[0185] (A7-6) the pharmaceutical composition of any one of (A7) to (A7-5), wherein the cytokine inhibitor is administered 6 days, 5 days, 4 days, 3 days, 2 days, or 1 day before each administration of the pharmaceutical composition during the step-up dosing period, or on the same day as but before said each administration;
[0186] (A7-7) the pharmaceutical composition of any one of (A7) to (A7-6), wherein the cytokine inhibitor is further administered on the same day as, or 1 day, 2 days, 3 days, 4 days, 5 days, or 6 days after each administration of the pharmaceutical composition during the step-up dosing period;
[0187] (A7-8) the pharmaceutical composition of any one of (A7) to (A7-7), wherein the cytokine inhibitor is further administered when CRS or signs of CRS develop after the administration of the pharmaceutical composition;
[0188] (A7-9) the pharmaceutical composition of (A7-8), wherein the CRS is CRS in Grade 2 or higher or Grade 3 or higher;
[0189] (A7-10) the pharmaceutical composition of any one of (A7) to (A7-9), wherein the cytokine inhibitor is an inhibitor of one or more cytokines selected from IL-1β, IL-2, IL-4, IL-5, IL-6, IL-8, IL-10, IL-12, IL-13, IL-15, IL-17, IL-1Ra, IL-2R, IFN-α, IFN-γ, MIP-1α, MIP-1β, MCP-1, TNFα, GM-CSF, G-CSF, CXCL9, CXCL10, CXCR factor, VEGF, RANTES, eotaxin, EGF, HGF, FGF-β, CD30, CD30L, CD40, CD40L, ferritin, and RAGE;
[0190] (A7-11) the pharmaceutical composition of any one of (A7) to (A7-10), wherein the cytokine inhibitor is an anti-IL6R antibody;
[0191] (A7-12) the pharmaceutical composition of any one of (A7) to (A7-11), wherein the cytokine inhibitor is Tocilizumab, and wherein Tocilizumab is administered at 8 mg/kg or less per dose for a patient weighing 30 kg or more and at 12 mg/kg or less per dose for a patient weighing less than 30 kg;
[0192] (A7-13) the pharmaceutical composition of any one of (A7) to (A7-12), wherein a corticosteroid is not administered before or simultaneously with the administration of the pharmaceutical composition;
[0193] (A7-14) the pharmaceutical composition of any one of (A7) to (A7-12), wherein a corticosteroid is further administered before, simultaneously with, or after the administration of the pharmaceutical composition;
[0194] (A7-15) the pharmaceutical composition of (A7-13) or (A7-14), wherein the corticosteroid is dexamethasone, a pharmaceutically acceptable salt thereof, or a derivative thereof;
[0195] (A7-16) the pharmaceutical composition of any one of (A7) to (A7-15), wherein the anti-T cell antigen-binding molecule is a bispecific antigen-binding molecule comprising
   [0196] (1) a domain comprising an antibody variable region having T cell receptor complex-binding activity, and
   [0197] (2) a domain comprising an antibody variable region having cancer antigen-binding activity;
[0198] (A7-17) the pharmaceutical composition of any one of (A7) to (A7-16), wherein the anti-T cell antigen-binding molecule is a bispecific antibody comprising
   [0199] (1) a domain comprising an antibody variable region having T cell receptor complex-binding activity,
   [0200] (2) a domain comprising an antibody variable region having glypican 3-binding activity, and
   [0201] (3) a domain comprising an Fc region with reduced binding activity to an Fcγ receptor;
[0202] (A7-18) the pharmaceutical composition of any one of (A7) to (A7-17), which is for treatment of cancer; and
[0203] (A7-19) the pharmaceutical composition of any one of (A7) to (A7-18), which is for treating cancer while preventing or alleviating cytokine release syndrome associated with administration of the anti-T cell antigen-binding molecule.

[0204] Alternatively, the present disclosure provides each of the following embodiments (when, in a regimen comprising a step-up dosing period and a subsequent maintenance dosing period, pre-administration of a cytokine inhibitor is performed for administration of an anti-T cell antigen-binding molecule for each administration during the step-up dosing period, and for the first or multiple administrations during the maintenance dosing period):
[0205] (A8) a pharmaceutical composition comprising an anti-T cell antigen-binding molecule, wherein the pharmaceutical composition is for use in its combination therapy with a cytokine inhibitor, wherein in the combination therapy
   [0206] (i) a step-up dosing period and a subsequent maintenance dosing period are comprised for the pharmaceutical composition, and
   [0207] (ii) (a) the cytokine inhibitor is administered before or simultaneously with each administration of the pharmaceutical composition during the step-up dosing period, and (b) the cytokine inhibitor is administered before or simultaneously with the first administration or each of the first to second, the first to third, the first to fourth, or the first to fifth administrations of the pharmaceutical composition during the maintenance dosing period;
[0208] (A8-1) the pharmaceutical composition of (A8), wherein the dose of the pharmaceutical composition is increased stepwise during the step-up dosing period;
[0209] (A8-2) the pharmaceutical composition of (A8) or (A8-1), wherein the pharmaceutical composition is administered twice, 3 times, 4 times, or 5 times during the step-up dosing period;
[0210] (A8-3) the pharmaceutical composition of any one of (A8) to (A8-2), wherein the pharmaceutical composition is administered at intervals of once every week, once every 2 weeks, or once every 3 weeks during the step-up dosing period;
[0211] (A8-4) the pharmaceutical composition of any one of (A8) to (A8-3), wherein the pharmaceutical composition is administered repeatedly at the same dose during the maintenance dosing period;
[0212] (A8-5) the pharmaceutical composition of any one of (A8) to (A8-4), wherein the pharmaceutical composition is administered repeatedly at intervals of once every week, once every 2 weeks, or once every 3 weeks during the maintenance dosing period;
[0213] (A8-6) the pharmaceutical composition of any one of (A8) to (A8-5), wherein the cytokine inhibitor is administered
   [0214] (a) 6 days, 5 days, 4 days, 3 days, 2 days, or 1 day before each administration of the pharmaceutical composition during the step-up dosing period, or on the same day as but before said each administration, and
   [0215] (b) 6 days, 5 days, 4 days, 3 days, 2 days, or 1 day before the first administration or each administration of the first to second, the first to third, the first to fourth, or the first to fifth administrations of the pharmaceutical composition during the maintenance dosing period, or on the same day as but before said first or each administration;
[0216] (A8-7) the pharmaceutical composition of any one of (A8) to (A8-6), wherein the cytokine inhibitor is further administered
   [0217] (a) on the same day as, or 1 day, 2 days, 3 days, 4 days, 5 days, or 6 days after each administration of the pharmaceutical composition during the step-up dosing period, and
   [0218] (b) on the same day as, or 1 day, 2 days, 3 days, 4 days, 5 days, or 6 days after the first administration or each administration of the first to second, the first to third, the first to fourth, or the first to fifth administrations of the pharmaceutical composition during the maintenance dosing period;
[0219] (A8-8) the pharmaceutical composition of any one of (A8) to (A8-7), wherein the cytokine inhibitor is further administered when CRS or signs of CRS develop after the administration of the pharmaceutical composition;
[0220] (A8-9) the pharmaceutical composition of (A8-8), wherein the CRS is CRS in Grade 2 or higher or Grade 3 or higher;
[0221] (A8-10) the pharmaceutical composition of any one of (A8) to (A8-9), wherein the cytokine inhibitor is an inhibitor of one or more cytokines selected from IL-1β, IL-2, IL-4, IL-5, IL-6, IL-8, IL-10, IL-12, IL-13, IL-15, IL-17, IL-1Ra, IL-2R, IFN-α, IFN-γ, MIP-1α, MIP-1β, MCP-1, TNFα, GM-CSF, G-CSF, CXCL9, CXCL10, CXCR factor, VEGF, RANTES, eotaxin, EGF, HGF, FGF-β, CD30, CD30L, CD40, CD40L, ferritin, and RAGE;
[0222] (A8-11) the pharmaceutical composition of any one of (A8) to (A8-10), wherein the cytokine inhibitor is an anti-IL6R antibody;
[0223] (A8-12) the pharmaceutical composition of any one of (A8) to (A8-11), wherein the cytokine inhibitor is Tocilizumab, and wherein Tocilizumab is administered at 8 mg/kg or less per dose for a patient weighing 30 kg or more and at 12 mg/kg or less per dose for a patient weighing less than 30 kg;
[0224] (A8-13) the pharmaceutical composition of any one of (A8) to (A8-12), wherein a corticosteroid is not administered before or simultaneously with the administration of the pharmaceutical composition;
[0225] (A8-14) the pharmaceutical composition of any one of (A8) to (A8-12), wherein a corticosteroid is further administered before, simultaneously with, or after the administration of the pharmaceutical composition;
[0226] (A8-15) the pharmaceutical composition of (A8-13) or (A8-14), wherein the corticosteroid is dexamethasone, a pharmaceutically acceptable salt thereof, or a derivative thereof;
[0227] (A8-16) the pharmaceutical composition of any one of (A8) to (A8-15), wherein the anti-T cell antigen-binding molecule is a bispecific antigen-binding molecule comprising:
   [0228] (1) a domain comprising an antibody variable region having T cell receptor complex-binding activity; and
   [0229] (2) a domain comprising an antibody variable region having cancer antigen-binding activity;
[0230] (A8-17) the pharmaceutical composition of any one of (A8) to (A8-16), wherein the anti-T cell antigen-binding molecule is a bispecific antibody comprising:
   [0231] (1) a domain comprising an antibody variable region having T cell receptor complex-binding activity;
   [0232] (2) a domain comprising an antibody variable region having glypican 3-binding activity; and
   [0233] (3) a domain comprising an Fc region with reduced binding activity to an Fcγ receptor;
[0234] (A8-18) the pharmaceutical composition of any one of (A8) to (A8-17), which is for treatment of cancer; and
[0235] (A8-19) the pharmaceutical composition of any one of (A8) to (A8-18), which is for treating cancer while preventing or alleviating cytokine release syndrome associated with administration of the anti-T cell antigen-binding molecule.

[0236] Alternatively, the present disclosure relates to each of the following embodiments (when, in a regimen comprising a step-up dosing period and a subsequent maintenance dosing period, pre-administration of a cytokine inhibitor is performed for administration of an anti-T cell antigen-binding molecule for each administration during the step-up dosing period, and for every dosing cycle during the maintenance dosing period):
[0237] (A9) a pharmaceutical composition comprising an anti-T cell antigen-binding molecule, wherein the pharmaceutical composition is for use in its combination therapy with a cytokine inhibitor, wherein in the combination therapy
   [0238] (i) a step-up dosing period and a subsequent maintenance dosing period are comprised for the pharmaceutical composition,
   [0239] (ii) the pharmaceutical composition is administered repeatedly in dosing cycles where 2, 3, 4, or 5 administrations constitute one cycle during the maintenance dosing period, and
   [0240] (iii) (a) the cytokine inhibitor is administered before or simultaneously with each administration of the pharmaceutical composition during the step-up dosing period, and (b) the cytokine inhibitor is administered before or simultaneously with the first administration of the pharmaceutical composition in each of the dosing cycles during the maintenance dosing period;
[0241] (A9-1) the pharmaceutical composition of (A9), wherein the dose of the pharmaceutical composition is increased stepwise during the step-up dosing period;
[0242] (A9-2) the pharmaceutical composition of (A9) or (A9-1), wherein the pharmaceutical composition is administered twice, 3 times, 4 times, or 5 times during the step-up dosing period;
[0243] (A9-3) the pharmaceutical composition of any one of (A9) to (A9-2), wherein the pharmaceutical composition is administered at intervals of once every week, once every 2 weeks, or once every 3 weeks during the step-up dosing period;
[0244] (A9-4) the pharmaceutical composition of any one of (A9) to (A9-3), wherein the pharmaceutical composition is administered repeatedly at the same dose during the maintenance dosing period;
[0245] (A9-5) the pharmaceutical composition of any one of (A9) to (A9-4), wherein the pharmaceutical composition is administered repeatedly at intervals of once every week, once every 2 weeks, or once every 3 weeks during the maintenance dosing period;
[0246] (A9-6) the pharmaceutical composition of any one of (A9) to (A9-5), wherein the cytokine inhibitor is administered
   [0247] (a) 6 days, 5 days, 4 days, 3 days, 2 days, or 1 day before each administration of the pharmaceutical composition during the step-up dosing period, or on the same day as but before said each administration, and
   [0248] (b) 6 days, 5 days, 4 days, 3 days, 2 days, or 1 day before the first administration of the pharmaceutical composition in each of the dosing cycles during the maintenance dosing period, or on the same day as but before said first administration;
[0249] (A9-7) the pharmaceutical composition of any one of (A9) to (A9-6), wherein the cytokine inhibitor is further administered
   [0250] (a) on the same day as, or 1 day, 2 days, 3 days, 4 days, 5 days, or 6 days after each administration of the pharmaceutical composition during the step-up dosing period, and
   [0251] (b) on the same day as, or 1 day, 2 days, 3 days, 4 days, 5 days, or 6 days after the first administration of the pharmaceutical composition in each of the dosing cycles during the maintenance dosing period;
[0252] (A9-8) the pharmaceutical composition of any one of (A9) to (A9-7), wherein the cytokine inhibitor is further administered when CRS or signs of CRS develop after the administration of the pharmaceutical composition;
[0253] (A9-9) the pharmaceutical composition of (A9-8), wherein the CRS is CRS in Grade 2 or higher or Grade 3 or higher;
[0254] (A9-10) the pharmaceutical composition of any one of (A9) to (A9-9), wherein the cytokine inhibitor is an inhibitor of one or more cytokines selected from IL-1β, IL-2, IL-4, IL-5, IL-6, IL-8, IL-10, IL-12, IL-13, IL-15, IL-17, IL-1Ra, IL-2R, IFN-α, IFN-γ, MIP-1α, MIP-1β, MCP-1, TNFα, GM-CSF, G-CSF, CXCL9, CXCL10, CXCR factor, VEGF, RANTES, eotaxin, EGF, HGF, FGF-β, CD30, CD30L, CD40, CD40L, ferritin, and RAGE;
[0255] (A9-11) the pharmaceutical composition of any one of (A9) to (A9-10), wherein the cytokine inhibitor is an anti-IL6R antibody;
[0256] (A9-12) the pharmaceutical composition of any one of (A9) to (A9-11), wherein the cytokine inhibitor is Tocilizumab, and wherein Tocilizumab is administered at 8 mg/kg or less per dose for a patient weighing 30 kg or more and at 12 mg/kg or less per dose for a patient weighing less than 30 kg;
[0257] (A9-13) the pharmaceutical composition of any one of (A9) to (A9-12), wherein a corticosteroid is not administered before or simultaneously with the administration of the pharmaceutical composition;
[0258] (A9-14) the pharmaceutical composition of any one of (A9) to (A9-12), wherein a corticosteroid is further administered before, simultaneously with, or after the administration of the pharmaceutical composition;
[0259] (A9-15) the pharmaceutical composition of (A9-13) or (A9-14), wherein the corticosteroid is dexamethasone, a pharmaceutically acceptable salt thereof, or a derivative thereof;
[0260] (A9-16) the pharmaceutical composition of any one of (A9) to (A9-15), wherein the anti-T cell antigen-binding molecule is a bispecific antigen-binding molecule comprising:
   [0261] (1) a domain comprising an antibody variable region having T cell receptor complex-binding activity; and
   [0262] (2) a domain comprising an antibody variable region having cancer antigen-binding activity;
[0263] (A9-17) the pharmaceutical composition of any one of (A9) to (A9-16), wherein the anti-T cell antigen-binding molecule is a bispecific antibody comprising:
   [0264] (1) a domain comprising an antibody variable region having T cell receptor complex-binding activity;
   [0265] (2) a domain comprising an antibody variable region having glypican 3-binding activity; and
   [0266] (3) a domain comprising an Fc region with reduced binding activity to an Fcγ receptor;
[0267] (A9-18) the pharmaceutical composition of any one of (A9) to (A9-17), which is for treatment of cancer; and
[0268] (A9-19) the pharmaceutical composition of any one of (A9) to (A9-18), which is for treating cancer while preventing or alleviating cytokine release syndrome associated with administration of the anti-T cell antigen-binding molecule.

[0269] Alternatively, in a non-limiting embodiment, the present disclosure relates to the following:
[0270] (A10) a kit comprising (i) a container, (ii) a pharmaceutical composition in the container, the composition comprising an anti-T cell antigen-binding molecule, and (iii) a document instructing to administer a cytokine inhibitor before, simultaneously with, or after administration of the pharmaceutical composition;
[0271] (A10-1) the kit of (A10), further comprising a label attached to the container, wherein the label indicates that the pharmaceutical composition can be used for treatment of cancer;
[0272] (A10-2) the kit of (A10) or (A10-1), wherein prescription of the pharmaceutical composition is performed according to the instructions in the document;
[0273] (A10-3) the kit of (A10) or (A10-1), which is for treating cancer by the prescription instructed by the document;
[0274] (A11) use of an anti-T cell antigen-binding molecule in producing a pharmaceutical composition for its combination therapy with a cytokine inhibitor; and
[0275] (A12) use of an anti-T cell antigen-binding molecule in its combination therapy with a cytokine inhibitor.

[0276] Alternatively, in a non-limiting embodiment, the present disclosure relates to the following:
[0277] (A13) a method of treating cancer by administering an anti-T cell antigen-binding molecule to a subject while preventing, alleviating, and/or treating cytokine release syndrome associated with the administration of the anti-T cell antigen-binding molecule, the method comprising using a cytokine inhibitor in combination.

[0278] Alternatively, the present disclosure comprises the following embodiments:
[0279] (B1) a pharmaceutical composition comprising a cytokine inhibitor, wherein the pharmaceutical composition is for use in its combination therapy with an anti-T cell antigen-binding molecule;
[0280] (B1-1) the pharmaceutical composition of (B1), which is for administration before, simultaneously with, or after administration of the anti-T cell antigen-binding molecule;
[0281] (B1-2) the pharmaceutical composition of (B1) or (B1-1), which is for administration before or simultaneously with the administration of the anti-T cell antigen-binding molecule;
[0282] (B1-3) the pharmaceutical composition of any one of (B1) to (B1-2), which is for administration 6 days, 5 days, 4 days, 3 days, 2 days, or 1 day before the administration of the anti-T cell antigen-binding molecule, or on the same day as but before said administration;
[0283] (B1-4) the pharmaceutical composition of any one of (B1) to (B1-3), which is for further administration on the same day as, or 1 day, 2 days, 3 days, 4 days, 5 days, or 6 days before the administration of the anti-T cell antigen-binding molecule;
[0284] (B1-5) the pharmaceutical composition of any one of (B1) to (B1-4), which is for further administration when CRS or signs of CRS develop after the administration of the anti-T cell antigen-binding molecule;
[0285] (B1-6) the pharmaceutical composition of (B1-5), wherein the CRS is CRS in Grade 2 or higher or Grade 3 or higher;
[0286] (B1-7) the pharmaceutical composition of (B1) or (B1-1), which is further administered after the administration of the anti-T cell antigen-binding molecule;
[0287] (B1-8) the pharmaceutical composition of (B1) or (B1-7), which is further administered when CRS or signs of CRS develop after the administration of the anti-T cell antigen-binding molecule;
[0288] (B1-9) the pharmaceutical composition of (B1-7) or (B1-8), wherein the CRS is CRS in Grade 2 or higher or Grade 3 or higher;
[0289] (B1-10) the pharmaceutical composition of any one of (B1) to (B1-9), wherein the cytokine inhibitor is an inhibitor of one or more cytokines selected from IL-1β, IL-2, IL-4, IL-5, IL-6, IL-8, IL-10, IL-12, IL-13, IL-15, IL-17, IL-1Ra, IL-2R, IFN-α, IFN-γ, MIP-1α, MIP-1β, MCP-1, TNFα, GM-CSF, G-CSF, CXCL9, CXCL10, CXCR factor, VEGF, RANTES, eotaxin, EGF, HGF, FGF-β, CD30, CD30L, CD40, CD40L, ferritin, and RAGE;
[0290] (B1-11) the pharmaceutical composition of any one of (B1) to (B1-10), wherein the cytokine inhibitor is an anti-IL6R antibody;
[0291] (B1-12) the pharmaceutical composition of any one of (B1) to (B1-11), wherein the cytokine inhibitor is Tocilizumab, and wherein Tocilizumab is administered at 8 mg/kg or less per dose for a patient weighing 30 kg or more and at 12 mg/kg or less per dose for a patient weighing less than 30 kg;
[0292] (B1-13) the pharmaceutical composition of any one of (B1) to (B1-12), wherein a corticosteroid is not administered before or simultaneously with the administration of the anti-T cell antigen-binding molecule;
[0293] (B1-14) the pharmaceutical composition of any one of (B1) to (B1-12), wherein a corticosteroid is further administered before, simultaneously with, or after the administration of the anti-T cell antigen-binding molecule;
[0294] (B1-15) the pharmaceutical composition of (B1-13) or (B1-14), wherein the corticosteroid is dexamethasone, a pharmaceutically acceptable salt thereof, or a derivative thereof;
[0295] (B1-16) the pharmaceutical composition of any one of (B1) to (B1-15), wherein the anti-T cell antigen-binding molecule is a bispecific antigen-binding molecule comprising:
   [0296] (1) a domain comprising an antibody variable region having T cell receptor complex-binding activity; and
   [0297] (2) a domain comprising an antibody variable region having cancer antigen-binding activity;
[0298] (B1-17) the pharmaceutical composition of any one of (B1) to (B1-16), wherein the anti-T cell antigen-binding molecule is a bispecific antibody comprising:
   [0299] (1) a domain comprising an antibody variable region having T cell receptor complex-binding activity;
   [0300] (2) a domain comprising an antibody variable region having glypican 3-binding activity; and
   [0301] (3) a domain comprising an Fc region with reduced binding activity to an Fcγ receptor; and
[0302] (B1-18) the pharmaceutical composition of any one of (B1) to (B1-17), which is for preventing or alleviating cytokine release syndrome associated with administration of the anti-T cell antigen-binding molecule.

[0303] Alternatively, the present disclosure comprises the following embodiments:
[0304] (B2) a pharmaceutical composition comprising a cytokine inhibitor, wherein the pharmaceutical composition is for use in its combination therapy with an anti-T cell antigen-binding molecule, wherein in the combination therapy,
   [0305] (i) the anti-T cell antigen-binding molecule is administered repeatedly, and
   [0306] (ii) the pharmaceutical composition is for administration before or simultaneously with each administration of the repeated administration;
[0307] (B3) a pharmaceutical composition comprising a cytokine inhibitor, wherein the pharmaceutical composition is for use in its combination therapy with an anti-T cell antigen-binding molecule, wherein in the combination therapy,
   [0308] (i) the anti-T cell antigen-binding molecule is administered repeatedly, and
   [0309] (ii) the pharmaceutical composition is for administration after or simultaneously with the first or each of the first to second, the first to third, the first to fourth, or the first to fifth administrations in the repeated administration;
[0310] (B4) a pharmaceutical composition comprising a cytokine inhibitor, wherein the pharmaceutical composition is for use in its combination therapy with an anti-T cell antigen-binding molecule, wherein in the combination therapy,
   [0311] (i) the anti-T cell antigen-binding molecule is administered repeatedly in dosing cycles where 2, 3, 4, or 5 administrations constitute one cycle, and
   [0312] (ii) the pharmaceutical composition is for administration before or simultaneously with the first administration of the anti-T cell antigen-binding molecule in each of the dosing cycles;
[0313] (B5) a pharmaceutical composition comprising a cytokine inhibitor, wherein the pharmaceutical composition is for use in its combination therapy with an anti-T cell antigen-binding molecule, wherein in the combination therapy,
   [0314] (i) the anti-T cell antigen-binding molecule is administered repeatedly in dosing cycles where 2, 3, 4, or 5 administrations constitute one cycle, and
   [0315] (ii) the pharmaceutical composition is for (a) administration before or simultaneously with each administration of the anti-T cell antigen-binding molecule during the first dosing cycle, and (b) administration before or simultaneously with the first administration of the anti-T cell antigen-binding molecule in each of the second and subsequent dosing cycles;
[0316] (B6) a pharmaceutical composition comprising a cytokine inhibitor, wherein the pharmaceutical composition is for use in its combination therapy with an anti-T cell antigen-binding molecule, wherein in the combination therapy
   [0317] (i) a step-up dosing period and a subsequent maintenance dosing period are comprised for the anti-T cell antigen-binding molecule, and
   [0318] (ii) the pharmaceutical composition is for administration before or simultaneously with each administration of the anti-T cell antigen-binding molecule during the step-up dosing period and the maintenance dosing period;
[0319] (B7) a pharmaceutical composition comprising a cytokine inhibitor, wherein the pharmaceutical composition is for use in its combination therapy with an anti-T cell antigen-binding molecule, wherein in the combination therapy,
   [0320] (i) the anti-T cell antigen-binding molecule is administered repeatedly in dosing cycles where 2, 3, 4, or 5 administrations constitute one cycle, and
   [0321] (ii) the pharmaceutical composition is for (a) administration before or simultaneously with each administration of the anti-T cell antigen-binding molecule during the first dosing cycle, and (b) administration before or simultaneously with the first administration of the anti-T cell antigen-binding molecule in each of the second and subsequent dosing cycles;
[0322] (B8) a pharmaceutical composition comprising a cytokine inhibitor, wherein the pharmaceutical composition is for use in its combination therapy with an anti-T cell antigen-binding molecule, wherein in the combination therapy
   [0323] (i) a step-up dosing period and a subsequent maintenance dosing period are comprised for the anti-T cell antigen-binding molecule, and
   [0324] (ii) the pharmaceutical composition is for administration (a) before or simultaneously with each administration of the anti-T cell antigen-binding molecule during the step-up dosing period, and (b) before or simultaneously with the first administration or each of the first to second, the first to third, the first to fourth, or the first to fifth administrations of the anti-T cell antigen-binding molecule during the maintenance dosing period; and
[0325] (B9) a pharmaceutical composition comprising a cytokine inhibitor, wherein the pharmaceutical composition is for use in its combination therapy with an anti-T cell antigen-binding molecule, wherein in the combination therapy
   [0326] (i) a step-up dosing period and a subsequent maintenance dosing period are comprised for the anti-T cell antigen-binding molecule,
   [0327] (ii) the anti-T cell antigen-binding molecule is administered repeatedly in dosing cycles where 2, 3, 4, or 5 administrations constitute one cycle during the maintenance dosing period, and
   [0328] (iii) the pharmaceutical composition is for administration (a) before or simultaneously with each administration of the anti-T cell antigen-binding molecule during the step-up dosing period, and (b) before or simultaneously with the first administration of the anti-T cell antigen-binding molecule in each of the dosing cycles during the maintenance dosing period.

[0329] Alternatively, in a non-limiting embodiment, the present disclosure relates to the following:
[0330] (B10) a kit comprising (i) a container, (ii) a pharmaceutical composition in the container, the composition comprising a cytokine inhibitor, and (iii) a document instructing to administer the pharmaceutical composition before, simultaneously with, or after administration of an anti-T cell antigen-binding molecule;
[0331] (B10-1) the kit of (B10), further comprising a label attached to the container, wherein the label indicates that the pharmaceutical composition can be used for prevention, alleviation, and/or treatment of cytokine release syndrome associated with the administration of the anti-T cell antigen-binding molecule;
[0332] (B10-2) the kit of (B10) or (B10-1), wherein prescription of the pharmaceutical composition is performed according to the instructions in the document;
[0333] (B10-3) the kit of (B10) or (B10-1), which is for preventing, alleviating, and/or treating cytokine release syndrome associated with the administration of the anti-T cell antigen-binding molecule by a prescription instructed by the document;
[0334] (B11) use of a cytokine inhibitor in producing a pharmaceutical composition for its combination therapy with an anti-T cell antigen-binding molecule; and
[0335] (B12) use of a cytokine inhibitor in its combination therapy with an anti-T cell antigen-binding molecule.

[0336] Alternatively, in a non-limiting embodiment, the present disclosure relates to the following:
[0337] (B13) a method of preventing, alleviating, and/or treating cytokine release syndrome associated with administration of an anti-T cell antigen-binding molecule, wherein the method comprises administering a cytokine inhibitor to a subject; and
[0338] (B14) a method of preventing and/or alleviating cytokine release syndrome associated with administration of an anti-T cell antigen-binding molecule, wherein the method comprises administering a cytokine inhibitor to a subject before or simultaneously with the administration of the anti-T cell antigen-binding molecule.

[0339] Alternatively, in a non-limiting embodiment, the present disclosure relates to the following:
[0340] (C1) a method of treating cancer, the method comprising administering an anti-T cell antigen-binding molecule and a cytokine inhibitor to a subject;
[0341] (C1-1) the method of (C1), wherein the cytokine inhibitor is administered before, simultaneously with, or after administration of the anti-T cell antigen-binding molecule;
[0342] (C1-2) the method of (C1) or (C1-1), wherein the cytokine inhibitor is administered before or simultaneously with the administration of the anti-T cell antigen-binding molecule;
[0343] (C1-3) the method of any one of (C1) to (C1-2), wherein the cytokine inhibitor is administered 6 days, 5 days, 4 days, 3 days, 2 days, or 1 day before the administration of the anti-T cell antigen-binding molecule, or on the same day as but before said administration; and
[0344] (C1-4) the method of any one of (C1) to (C1-3), wherein the cytokine inhibitor is further administered on the same day as, or 1 day, 2 days, 3 days, 4 days, 5 days, or 6 days after the administration of the anti-T cell antigen-binding molecule.

[0345] In a non-limiting embodiment, the present disclosure relates to combination therapies of various embodiments disclosed herein, which comprise administering an anti-T cell antigen-binding molecule and cytokine inhibitor; methods for treating cancer by the combination therapies; and methods for preventing, alleviating, and/or treating, by the combination therapies, cytokine release syndrome associated with administration of an anti-T cell antigen-binding molecule. Alternatively, in the methods for treating cancer comprising administering an anti-T cell antigen-binding molecule, the present disclosure provides combination therapies aimed at any one or a combination selected from prevention, alleviation, and treatment of cytokine release syndrome associated with administration of the anti-T cell antigen-binding molecule.

[0346] Alternatively, in a non-limiting embodiment, the present disclosure relates to the following:
[0347] (C2) a method for a combination therapy comprising steps of administering an anti-T cell antigen-binding molecule and administering a cytokine inhibitor to a subject;
[0348] (C3) a combinatorial therapy, comprising an anti-T cell antigen-binding molecule and a cytokine inhibitor;
[0349] (C4) a combination of an anti-T cell antigen-binding molecule and a cytokine inhibitor;
[0350] (C5) a pharmaceutical composition comprising an anti-T cell antigen-binding molecule and a cytokine inhibitor; and
[0351] (C5-1) the pharmaceutical composition of (C5), which is for treatment of cancer.

### Effects of the Invention

[0352] Anti-T cell antigen-binding molecules which bind to T cell antigens such as CD3 are drawing attention as novel means for treating cancer that utilizes the antitumor effects of T cells possessed by living bodies. However, since they target T cells that produce cytokines, possibility of causing adverse reactions due to cytokine production (for example, cytokine release syndrome) has been pointed out. Therefore, concerns of unexpected adverse reactions caused by cytokine production had existed for administration of anti-T cell antigen-binding molecules. In the present disclosure, an anti-T cell antigen-binding molecule is administered in combination with a cytokine inhibitor in a preplanned manner; therefore, unexpected adverse reactions caused by cytokines can be prevented or alleviated.

### BRIEF DESCRIPTION OF DRAWINGS

[0353] FIG. 1 shows the relationship between the amino acid residues constituting the Fc regions of IgG1, IgG2, IgG3, and IgG4, and the Kabat EU numbering system (herein, also referred to as EU INDEX).

[0354] FIG. 2-1 shows the heavy chain variable region sequences and their various numbering according to Kabat et al.

[0355] FIG. 2-2 shows the heavy chain variable region sequences and their various numbering according to Kabat et al.

[0356] FIG. 3 shows the light chain variable region sequences and their various numbering according to Kabat et al.

[0357] FIG. 4A shows cytokine detection in patient ID840010006 of cohort 10A. The vertical axis represents the serum cytokine concentration (pg/mL), and the horizontal axis represents the number of days from the first day of administration; provided that, the number of days on the horizontal axis is the nominal time calculated based on the clinical trial visit and blood sampling time defined in the study protocol. In the present figure, the administration start day (first day) is displayed as Day 0, and ERY974 was administered on Days 0, 7, and 21 on the present figure (drug interruption on Day 14, and dose reduction on Day 21).

[0358] FIG. 4B shows cytokine detection in patient ID840010007 of cohort 10A. The vertical axis represents the serum cytokine concentration (pg/mL), and the horizontal axis represents the number of days from the first day of administration. In the present figure, the administration start day (first day) is displayed as Day 0, and ERY974 was administered on Days 0, 7, 21, and 28 in the present figure (drug interruption on Day 14, and dose-reduction on Day 21). As in FIG. 4A, the number of days on the horizontal axis is the nominal time.

[0359] FIG. 4C shows cytokine detection in patient ID840040003 of cohort 10A. The vertical axis represents the serum cytokine concentration (pg/mL), and the horizontal axis represents the number of days from the first day of administration. In the present figure, the administration start day (first day) is displayed as Day 0, and ERY974 was administered on Days 0, 7, 14, 21, and 28 in the present figure (dose reduction on Day 14 and onwards). As in FIG. 4A, the number of days on the horizontal axis is the nominal time.

[0360] FIG. 5A is a simulation of changes in serum Tocilizumab concentration when Tocilizumab is administered at 8 mg/kg (intravenous administration: IV) on Day 0, based on the population pharmacokinetic model reported in the article by Frey et al. The vertical axis represents the serum Tocilizumab concentration (μg/mL), and the horizontal axis represents the number of days after administration of Tocilizumab. The dashed line shows the target concentration of Tocilizumab (10 μg/mL), and the alternate long and short dash line depicts, as a reference, the Michaelis coefficient (Km value) (0.367 μg/mL) in the article by Gibiansky et al.

[0361] FIG. 5B is a simulation of changes in serum Tocilizumab concentration when Tocilizumab is administered at 8 mg/kg (IV) on Day 0, based on the population pharmacokinetic model reported in the article by Gibiansky et al. The vertical axis represents the serum Tocilizumab concentration (μg/mL), and the horizontal axis represents the number of days after administration of Tocilizumab. The dashed line shows the target concentration of Tocilizumab (10 μg/mL), and the alternate long and short dash line depicts, as a reference, the Michaelis coefficient (Km value) (0.367 μg/mL) in the article by Gibiansky et al.

[0362] FIG. 6A is a simulation of changes in serum Tocilizumab concentration when Tocilizumab is intravenously administered (IV) at 8 mg/kg on Day 0, based on the population pharmacokinetic model reported in the article by Frey et al. The vertical axis represents the serum Tocilizumab concentration (μg/mL), and the horizontal axis represents the number of days after administration of Tocilizumab.

[0363] FIG. 6B is a simulation of changes in serum Tocilizumab concentration when Tocilizumab is subcutaneously administered (SC) at 8 mg/kg on Day 0, based on the population pharmacokinetic model reported in the article by Frey et al. The vertical axis represents the serum Tocilizumab concentration (μg/mL), and the horizontal axis represents the number of days after administration of Tocilizumab. The simulation used as F (bioavailability) and Ka (absorption rate constant), values reported in Abdallah, Hisham et al. “Pharmacokinetic and Pharmacodynamic Analysis of Subcutaneous Tocilizumab in Patients with Rheumatoid Arthritis From 2 Randomized, Controlled Trials: SUMMACTA and BREVACTA.” Journal of clinical pharmacology vol. 57.4 (2017): 459-468.

[0364] FIG. 7 is a simulation of changes in the concentration of unbound IL-6R (IL-6R not complexed with Tocilizumab) in serum when Tocilizumab is administered at 8 mg/kg on Day 0, based on the population pharmacokinetic model reported in the article by Gibiansky et al. The vertical axis represents the unbound IL-6R concentration in serum (μg/mL), and the horizontal axis represents the number of days after administration of Tocilizumab.

[0365] FIG. 8 is a simulation of changes in serum Tocilizumab concentration when Tocilizumab is administered (IV) at 8 mg/kg per dose from Day 0, at intervals of once every week (QW), once every 2 weeks (Q2W), once every 3 weeks (Q3W), or once every 4 weeks (Q4W) based on the population pharmacokinetic model reported in the article by Gibiansky et al. FIGS. 8A, 8B, 8C, and 8D show the simulation results of QW, Q2W, Q3W, and Q4W, respectively.

[0366] The vertical axis represents the serum Tocilizumab concentration (μg/mL), and the horizontal axis represents the number of days after administration of Tocilizumab. The dashed line shows the target concentration of Tocilizumab (10 μg/mL), and the alternate long and short dash line depicts, as a reference, the Michaelis coefficient (Km value) (0.367 μg/mL) in the article by Gibiansky et al.

[0367] FIG. 9 is a simulation of changes in the concentration of the IL-6/IL-6R complex in serum when Tocilizumab is administered (IV) at 8 mg/kg per dose from Day 0, at intervals of once every week (QW), based on the population pharmacokinetic model reported in the article by Gibiansky et al.

[0368] FIGS. 9A, 9B, 9C, 9D, and 9E show the simulation results when the serum IL-6 concentrations are 300 pg/mL, 1000 pg/mL, 3000 pg/mL, 5000 pg/mL, and 10000 pg/mL, respectively.

[0369] The vertical axis represents the concentration of the IL-6/IL-6R complex (nM), and the horizontal axis represents the number of days after starting the administration of Tocilizumab.

[0370] FIG. 10 is a simulation of changes in the concentration of the IL-6/IL-6R complex in serum when Tocilizumab is administered (IV) at 8 mg/kg per dose from Day 0, at intervals of once every 2 weeks (Q2W), based on the population pharmacokinetic model reported in the article by Gibiansky et al.

[0371] FIGS. 10A, 10B, 10C, 10D, and 10E show the simulation results when the serum IL-6 concentrations are 300 pg/mL, 1000 pg/mL, 3000 pg/mL, 5000 pg/mL, and 10000 pg/mL, respectively.

[0372] The vertical axis represents the concentration of the IL-6/IL-6R complex (nM), and the horizontal axis represents the number of days after starting the administration of Tocilizumab.

[0373] FIG. 11 is a simulation of changes in the concentration of the IL-6/IL-6R complex in serum when Tocilizumab is administered (IV) at 8 mg/kg per dose from Day 0, at intervals of once every 3 weeks (Q3W), based on the population pharmacokinetic model reported in the article by Gibiansky et al.

[0374] FIGS. 11A, 11B, 11C, 11D, and 11E show the simulation results when the serum IL-6 concentrations are 300 pg/mL, 1000 pg/mL, 3000 pg/mL, 5000 pg/mL, and 10000 pg/mL, respectively.

[0375] The vertical axis represents the concentration of the IL-6/IL-6R complex (nM), and the horizontal axis represents the number of days after starting the administration of Tocilizumab.

[0376] FIG. 12 shows the antitumor effects in a syngeneic mouse model (i) when the ERY974 surrogate antibody alone was administered, (ii) when the anti-mouse IL6 receptor antibody (MR-16-1) was administered, and (iii) when the ERY974 surrogate antibody was administered after pre-administration of the anti-mouse IL6 receptor antibody (MR-16-1).

[0377] FIG. 13 shows the antitumor effects in a syngeneic mouse model (i) when the ERY974 surrogate antibody alone was administered, (ii) when the anti-mouse IL6 receptor antibody (MR-16-1) was administered, and (iii) when the anti-mouse IL6 receptor antibody (MR-16-1) was administered after administration of the ERY974 surrogate antibody.

### DESCRIPTION OF EMBODIMENTS

### I. Definitions

[0378] The definitions below are provided to help understanding of the present invention illustrated herein.

[0379] The term “specific” means that one of molecules involved in specific binding does not show any significant binding to molecules other than a single or a number of binding partner molecules. Furthermore, the term is also used when a domain containing an antibody variable region is specific to a particular epitope among multiple epitopes in an antigen. When an epitope bound by a domain containing an antibody variable region is included in a number of different antigens, antigen-binding molecules comprising the antibody variable region-containing domain can bind to various antigens that have the epitope.

[0380] The term “binding activity” refers to the strength of the sum total of noncovalent interactions between one or more binding sites of a molecule (e.g., an antibody) and its binding partner (e.g., an antigen). Herein, “binding activity” is not strictly limited to a 1:1 interaction between members of a binding pair (e.g., antibody and antigen). For example, when the members of a binding pair reflect a monovalent 1:1 interaction, the binding activity is particularly called the intrinsic binding affinity (affinity). When a member of a binding pair is capable of both monovalent binding and multivalent binding, the binding activity is the sum of each binding strength. The binding activity of a molecule X for its partner Y can generally be represented by the dissociation constant (KD) or “binding amount of analyte per unit amount of ligand” (hereinbelow, may be referred to as “binding amount”). Those skilled in the art would understand that, generally, lower value of dissociation constant (KD) means higher binding activity; and higher value of “binding amount of analyte per unit amount of ligand” or “binding amount” means higher binding activity. Binding activity can be measured by common methods known in the art, including those described herein. Specific illustrative and exemplary embodiments for measuring binding activity (including affinity) are described in the following. Specific illustrative and exemplary embodiments for measuring binding affinity are described in the following.

[0381] The terms “anti-‘target antigen’-binding antigen-binding molecule” (herein ‘target antigen’ is any antigen protein that can be targeted, and examples include a T cell antigen, cancer antigen, cytokine, and cytokine receptor) and “an antigen-binding molecule that binds to a target antigen” refers to an antigen-binding molecule that is capable of binding a target antigen with sufficient affinity such that the antigen-binding molecule is useful as a diagnostic and/or therapeutic agent when the antigen-binding molecule targets the antigen. In one embodiment, the extent of binding of an antigen-binding molecule to an unrelated, non-target antigen protein is less than about 10% of the binding of the antigen-binding molecule to the target antigen as measured, e.g., by a radioimmunoassay (RIA). In certain embodiments, an antigen-binding molecule that binds to the target protein has a dissociation constant (Kd) of 1 micro M or less, 100 nM or less, 10 nM or less, 1 nM or less, 0.1 nM or less, 0.01 nM or less, or 0.001 nM or less (e.g. 10⁻⁸ M or less, e.g. from 10⁻⁸ M to 10⁻¹³ M, e.g., from 10⁻⁹ M to 10⁻¹³ M). In certain embodiments, an antigen-binding molecule binds to an epitope of the target antigen that is conserved among the target antigen from different species.

[0382] An antigen-binding molecule “that binds to the same epitope” as a reference antigen-binding molecule refers to an antigen-binding molecule that blocks binding of the reference antigen-binding molecule to its antigen in a competition assay by 50% or more, and conversely, the reference antigen-binding molecule blocks binding of the antigen-binding molecule to its antigen in a competition assay by 50% or more. An exemplary competition assay is provided herein.

[0383] In an exemplary competition assay, an immobilized antigen (for example, GPC3, CD3, and/or IL-6 receptor) is incubated in a solution comprising a first labeled antigen-binding molecule that binds to the antigen and a second unlabeled antigen-binding molecule that is being tested for its ability to compete with the first antigen-binding molecule for binding to the antigen. The second antigen-binding molecule may be present in a hybridoma supernatant. As a control, the immobilized antigen is incubated in a solution comprising the first labeled antigen-binding molecule but not the second unlabeled antigen-binding molecule. After incubation under conditions permissive for binding of the first antigen-binding molecule to the antigen, excess unbound antigen-binding molecule is removed, and the amount of label associated with the immobilized antigen is measured. If the amount of label associated with the immobilized antigen is substantially reduced in the test sample relative to the control sample, then that indicates that the second antigen-binding molecule is competing with the first antigen-binding molecule for binding to the antigen. See Harlow and Lane (1988) Antibodies: A Laboratory Manual ch.14 (Cold Spring Harbor Laboratory, Cold Spring Harbor, N.Y.).

[0384] The term “antigen-binding molecule” herein is used in the broadest sense and encompasses various antibody structures, including but not limited to monoclonal antibodies, polyclonal antibodies, multispecific antibodies (e.g., bispecific antibodies), antibody derivatives, and antibody fragments so long as they exhibit the desired antigen-binding activity.

[0385] In certain embodiments, an antibody provided herein may be further modified to contain additional nonproteinaceous moieties that are known in the art and readily available (this is called “antibody derivatives”). The moieties suitable for derivatization of the antibody include but are not limited to water soluble polymers. Non-limiting examples of water soluble polymers include, but are not limited to, polyethylene glycol (PEG), copolymers of ethylene glycol/propylene glycol, carboxymethylcellulose, dextran, polyvinyl alcohol, polyvinyl pyrrolidone, poly-1, 3-dioxolane, poly-1,3,6-trioxane, ethylene/maleic anhydride copolymer, polyaminoacids (either homopolymers or random copolymers), and dextran or poly(n-vinyl pyrrolidone)polyethylene glycol, polypropylene glycol homopolymers, polypropylene oxide/ethylene oxide co-polymers, polyoxyethylated polyols (e.g., glycerol), polyvinyl alcohol, and mixtures thereof. Polyethylene glycol propionaldehyde may have advantages in manufacturing due to its stability in water. The polymer may be of any molecular weight, and may be branched or unbranched. The number of polymers attached to the antibody may vary, and if more than one polymer are attached, they can be the same or different molecules. In general, the number and/or type of polymers used for derivatization can be determined based on considerations including, but not limited to, the particular properties or functions of the antibody to be improved, whether the antibody derivative will be used in a therapy under defined conditions, etc.

[0386] An “antibody fragment” refers to a molecule other than an intact antibody that comprises a portion of an intact antibody that binds the antigen to which the intact antibody binds. Examples of antibody fragments include but are not limited to Fv, Fab, Fab′, Fab′-SH, F(ab′)2; diabodies; linear antibodies; single-chain antibody molecules (e.g. scFv); and multispecific antibodies formed from antibody fragments.

[0387] An “antibody that binds to the same epitope” as a reference antibody refers to an antibody that blocks binding of the reference antibody to its antigen in a competition assay by 50% or more, and conversely, the reference antibody blocks binding of the antibody to its antigen in a competition assay by 50% or more. An exemplary competition assay is provided herein.

[0388] The term “chimeric” antibody refers to an antibody in which a portion of the heavy and/or light chain is derived from a particular source or species, while the remainder of the heavy and/or light chain is derived from a different source or species.

[0389] The “class” of an antibody refers to the type of constant domain or constant region possessed by its heavy chain. There are five major classes of antibodies: IgA, IgD, IgE, IgG, and IgM, and several of these may be further divided into subclasses (isotypes), e.g., IgG1, IgG2, IgG3, IgG4, IgA1, and IgA2. The heavy chain constant domains that correspond to the different classes of immunoglobulins are called alpha, delta, epsilon, gamma, and mu, respectively.

[0390] Constant regions of the isotypes IgG1, IgG2, IgG3, and IgG4 are called Cγ1, Cγ2, Cγ3, and Cγ4, respectively. The amino acid sequences of Fc domain polypeptides forming human Cγ1, Cγ2, Cγ3, and Cγ4 are exemplified in SEQ ID NO: 23, 24, 25, and 26, respectively. The relationship between amino acid residues forming each amino acid sequence and Kabat's EU numbering (herein also referred to as EU INDEX) are shown in FIG. 1.

[0391] The term “Fc region” herein is used to define a C-terminal region of an immunoglobulin heavy chain that contains at least a portion of the constant region. The term includes native sequence Fc regions and variant Fc regions. In one embodiment, a human IgG heavy chain Fc region extends from Cys226, or from Pro230, to the carboxyl-terminus of the heavy chain. However, the C-terminal lysine (Lys447) or glycine-lysine (residues 446-447) of the Fc region may or may not be present. Unless otherwise specified herein, numbering of amino acid residues in the Fc region or constant region is according to the EU numbering system, also called the EU index, as described in Kabat et al., Sequences of Proteins of Immunological Interest, 5th Ed. Public Health Service, National Institutes of Health, Bethesda, Md., 1991.

[0392] The term “Fc receptor” or “FcR” refers to a receptor that binds to the Fc region of an antibody. In some embodiments, an FcR is a native human FcR. In some embodiments, an FcR is one which binds an IgG antibody (a gamma receptor) and includes receptors of the Fc gamma RI, Fc gamma RII, and Fc gamma RIII subclasses, including allelic variants and alternatively spliced forms of those receptors. Fc gamma RII receptors include Fc gamma RIIA (an “activating receptor”) and Fc gamma RIIB (an “inhibiting receptor”), which have similar amino acid sequences that differ primarily in the cytoplasmic domains thereof. Activating receptor Fc gamma RIIA contains an immunoreceptor tyrosine-based activation motif (ITAM) in its cytoplasmic domain. Inhibiting receptor Fc gamma RIIB contains an immunoreceptor tyrosine-based inhibition motif (ITIM) in its cytoplasmic domain. (see, e.g., Daëron, Annu. Rev. Immunol. 15:203-234 (1997)). FcRs are reviewed, for example, in Ravetch and Kinet, Annu. Rev. Immunol 9:457-92 (1991); Capel et al., Immunomethods 4:25-34 (1994); and de Haas et al., J. Lab. Clin. Med. 126:330-41 (1995). Other FcRs, including those to be identified in the future, are encompassed by the term “FcR” herein.

[0393] The term “Fc receptor” or “FcR” also includes the neonatal receptor, FcRn, which is responsible for the transfer of maternal IgGs to the fetus (Guyer et al., J. Immunol. 117:587 (1976) and Kim et al., J. Immunol. 24:249 (1994)) and regulation of homeostasis of immunoglobulins. Methods of measuring binding to FcRn are known (see, e.g., Ghetie and Ward., Immunol. Today 18(12):592-598 (1997); Ghetie et al., Nature Biotechnology, 15(7):637-640 (1997); Hinton et al., J. Biol. Chem. 279(8):6213-6216 (2004); WO 2004/92219 (Hinton et al.).

[0394] Binding to human FcRn in vivo and plasma half life of human FcRn high affinity binding polypeptides can be assayed, e.g., in transgenic mice or transfected human cell lines expressing human FcRn, or in primates to which the polypeptides with a variant Fc region are administered. WO 2000/42072 (Presta) describes antibody variants with increased or decreased binding to FcRs. See also, e.g., Shields et al. J. Biol. Chem. 9(2):6591-6604 (2001).

[0395] The term “Fc region-comprising antibody” refers to an antibody that comprises an Fc region. The C-terminal lysine (residue 447 according to the EU numbering system) or C-terminal glycine-lysine (residues 446-447) of the Fc region may be removed, for example, during purification of the antibody or by recombinant engineering of the nucleic acid encoding the antibody. Accordingly, a composition comprising an antibody having an Fc region according to this invention can comprise an antibody with G446-K447, with G446 and without K447, with all G446-K447 removed, or a mixture of three types of antibodies described above.

[0396] Fc regions with reduced Fc receptor-binding activity include Fc regions with reduced binding activity to any of Fcγ receptors FcγI, FcγIIA, FcγIIB, FcγIIIA, and/or FcγIIIB. The reduced binding activity to any of the Fcγ receptors FcγI, FcγIIA, FcγIIB, FcγIIIA, and/or FcγIIIB can be assessed by using FACS and ELISA formats known to those skilled in the art as well as ALPHA screen (Amplified Luminescent Proximity Homogeneous Assay) and surface plasmon resonance (SPR)-based BIACORE method (Proc. Natl. Acad. Sci. USA (2006) 103(11), 4005-4010).

[0397] Antigen-binding molecules or antibodies comprising an Fc region with reduced Fc receptor-binding activity include antigen-binding molecules or antibodies with reduced effector function. Antigen-binding molecules or antibodies with reduced effector function include those with substitution of one or more of Fc region residues 238, 265, 269, 270, 297, 327 and 329 (U.S. Pat. No. 6,737,056). Such Fc mutants include Fc mutants with substitutions at two or more of amino acid positions 265, 269, 270, 297 and 327, including the so-called “DANA” Fc mutant with substitution of residues 265 and 297 to alanine (U.S. Pat. No. 7,332,581).

[0398] Certain antibody variants with increased or decreased binding to FcRs are described. (See, e.g., U.S. Pat. No. 6,737,056; WO 2004/056312, and Shields et al., J. Biol. Chem. 9(2): 6591-6604 (2001).)

[0399] In certain embodiments, an antibody variant comprises an Fc region with one or more amino acid substitutions which improve ADCC, e.g., substitutions at positions 298, 333, and/or 334 of the Fc region (EU numbering of residues).

[0400] In some embodiments, alterations are made in the Fc region that result in altered (i.e., either increased or decreased) C1q binding and/or Complement Dependent Cytotoxicity (CDC), e.g., as described in U.S. Pat. No. 6,194,551, WO 99/51642, and Idusogie et al. J. Immunol. 164: 4178-4184 (2000).

[0401] In some embodiments, Fc regions with reduced Fc receptor-binding activity include Fc mutants of the Fc regions illustrated herein.

[0402] “Framework” or “FR” refers to variable domain residues other than hypervariable region (HVR) residues. The FR of a variable domain generally consists of four FR domains: FR1, FR2, FR3, and FR4. Accordingly, the HVR and FR sequences generally appear in the following sequence in VH (or VL): FR1-H1(L1)-FR2-H2(L2)-FR3-H3(L3)-FR4.

[0403] The terms “full length antibody,” “intact antibody,” and “whole antibody” are used herein interchangeably to refer to an antibody having a structure substantially similar to a native antibody structure or having heavy chains that contain an Fc region as defined herein.

[0404] The terms “host cell,” “host cell line,” and “host cell culture” are used interchangeably and refer to cells into which exogenous nucleic acid has been introduced, including the progeny of such cells. Host cells include “transformants” and “transformed cells,” which include the primary transformed cell and progeny derived therefrom without regard to the number of passages. Progeny may not be completely identical in nucleic acid content to a parent cell, but may contain mutations. Mutant progeny that have the same function or biological activity as screened or selected for in the originally transformed cell are included herein.

[0405] A “human antibody” is one which possesses an amino acid sequence which corresponds to that of an antibody produced by a human or a human cell or derived from a non-human source that utilizes human antibody repertoires or other human antibody-encoding sequences. This definition of a human antibody specifically excludes a humanized antibody comprising non-human antigen-binding residues.

[0406] A “human consensus framework” is a framework which represents the most commonly occurring amino acid residues in a selection of human immunoglobulin VL or VH framework sequences. Generally, the selection of human immunoglobulin VL or VH sequences is from a subgroup of variable domain sequences. Generally, the subgroup of sequences is a subgroup as in Kabat et al., Sequences of Proteins of Immunological Interest, Fifth Edition, NIH Publication 91-3242, Bethesda Md. (1991), vols. 1-3. In one embodiment, for the VL, the subgroup is subgroup kappa I as in Kabat et al., supra. In one embodiment, for the VH, the subgroup is subgroup III as in Kabat et al., supra.

[0407] A “humanized” antibody refers to a chimeric antibody comprising amino acid residues from non-human HVRs and amino acid residues from human FRs. In certain embodiments, a humanized antibody will comprise substantially all of at least one, and typically two, variable domains, in which all or substantially all of the HVRs (e.g., CDRs) correspond to those of a non-human antibody, and all or substantially all of the FRs correspond to those of a human antibody. A humanized antibody optionally may comprise at least a portion of an antibody constant region derived from a human antibody. A “humanized form” of an antibody, e.g., a non-human antibody, refers to an antibody that has undergone humanization.

[0408] The term “hypervariable region,” “HVR,” or “CDR” as used herein refers to each of the regions of an antibody variable domain which are hypervariable in sequence (“complementarity determining regions” or “complementarity determining regions”) and/or form structurally defined loops (“hypervariable loops”) and/or contain the antigen-contacting residues (“antigen contacts”). Generally, antibodies comprise six CDRs: three in the VH (H1, H2, H3), and three in the VL (L1, L2, L3). Exemplary CDRs herein include:
[0409] (a) hypervariable loops occurring at amino acid residues 26-32 (L1), 50-52 (L2), 91-96 (L3), 26-32 (H1), 53-55 (H2), and 96-101 (H3) (Chothia and Lesk, J. Mol. Biol. 196:901-917 (1987));
[0410] (b) CDRs occurring at amino acid residues 24-34 (L1), 50-56 (L2), 89-97 (L3), 31-35b (H1), 50-65 (H2), and 95-102 (H3) (Kabat et al., Sequences of Proteins of Immunological Interest, 5th Ed. Public Health Service, National Institutes of Health, Bethesda, Md. (1991));
[0411] (c) antigen contacts occurring at amino acid residues 27c-36 (L1), 46-55 (L2), 89-96 (L3), 30-35b (H1), 47-58 (H2), and 93-101 (H3) (MacCallum et al. J. Mol. Biol. 262: 732-745 (1996)); and
[0412] (d) combinations of (a), (b), and/or (c), including amino acid residues 46-56 (L2), 47-56 (L2), 48-56 (L2), 49-56 (L2), 26-35 (H1), 26-35b (H1), 49-65 (H2), 93-102 (H3), and 94-102 (H3).

[0413] Unless otherwise indicated, CDR residues and other residues in the variable domain (e.g., FR residues) are numbered herein according to Kabat et al., supra.

[0414] An “individual,” “subject,” or “patient” is a mammal. Mammals include, but are not limited to, domesticated animals (e.g., cows, sheep, cats, dogs, and horses), primates (e.g., humans and non-human primates such as monkeys), rabbits, and rodents (e.g., mice and rats). In certain embodiments, the individual or subject is a human.

[0415] An “isolated” antigen-binding molecule is one which has been separated from a component of its natural environment. In some embodiments, an antigen-binding molecule is purified to greater than 95% or 99% purity as determined by, for example, electrophoretic (e.g., SDS-PAGE, isoelectric focusing (IEF), capillary electrophoresis) or chromatographic (e.g., ion exchange or reverse phase HPLC). For review of methods for assessment of antibody purity, see, e.g., Flatman et al., J. Chromatogr. B 848:79-87 (2007).

[0416] An “isolated” nucleic acid refers to a nucleic acid molecule that has been separated from a component of its natural environment. An isolated nucleic acid includes a nucleic acid molecule contained in cells that ordinarily contain the nucleic acid molecule, but the nucleic acid molecule is present extrachromosomally or at a chromosomal location that is different from its natural chromosomal location.

[0417] “Isolated nucleic acid encoding an antigen-binding molecule” refers to one or more nucleic acid molecules encoding one or two or more polypeptide chains or its fragments of antigen-binding molecule (in case of antibody, antibody heavy and light chains or fragments thereof), including such nucleic acid molecule(s) in a single vector or separate vectors, and such nucleic acid molecule(s) present at one or more locations in a host cell.

[0418] The term “monoclonal antibody” as used herein refers to an antibody obtained from a population of substantially homogeneous antibodies, i.e., the individual antibodies composing the population are identical and/or bind the same epitope, except for possible variant antibodies, e.g., containing naturally occurring mutations or arising during production of a monoclonal antibody preparation, such variants generally being present in minor amounts. In contrast to polyclonal antibody preparations, which typically include different antibodies directed against different determinants (epitopes), each monoclonal antibody of a monoclonal antibody preparation is directed against a single determinant on an antigen. Thus, the modifier “monoclonal” indicates the character of the antibody as being obtained from a substantially homogeneous population of antibodies, and is not to be construed as requiring production of the antibody by any particular method. For example, the monoclonal antibodies to be used in accordance with the present invention may be made by a variety of techniques, including but not limited to the hybridoma method, recombinant DNA methods, phage-display methods, and methods utilizing transgenic animals containing all or part of the human immunoglobulin loci, such methods and other exemplary methods for making monoclonal antibodies being described herein.

[0419] The term “package insert” is used to refer to instructions customarily included in commercial packages of therapeutic products, that contain information about the indications, usage, dosage, administration, combination therapy, contraindications and/or warnings concerning the use of such therapeutic products.

[0420] “Percent (%) amino acid sequence identity” with respect to a reference polypeptide sequence is defined as the percentage of amino acid residues in a candidate sequence that are identical with the amino acid residues in the reference polypeptide sequence, after aligning the sequences and introducing gaps, if necessary, to achieve the maximum percent sequence identity, and not considering any conservative substitutions as part of the sequence identity. Alignment for purposes of determining percent amino acid sequence identity can be achieved in various ways that are within the skill in the art, for instance, using publicly available computer software such as BLAST, BLAST-2, ALIGN, Megalign (DNASTAR) software, or GENETYX (registered trademark) (Genetyx Co., Ltd.). Those skilled in the art can determine appropriate parameters for aligning sequences, including any algorithms needed to achieve maximal alignment over the full length of the sequences being compared.

[0421] The ALIGN-2 sequence comparison computer program was authored by Genentech, Inc., and the source code has been filed with user documentation in the U.S. Copyright Office, Washington D.C., 20559, where it is registered under U.S. Copyright Registration No. TXU510087. The ALIGN-2 program is publicly available from Genentech, Inc., South San Francisco, Calif., or may be compiled from the source code. The ALIGN-2 program should be compiled for use on a UNIX operating system, including digital UNIX V4.0D. All sequence comparison parameters are set by the ALIGN-2 program and do not vary.

[0422] In situations where ALIGN-2 is employed for amino acid sequence comparisons, the % amino acid sequence identity of a given amino acid sequence A to, with, or against a given amino acid sequence B (which can alternatively be phrased as a given amino acid sequence A that has or comprises a certain % amino acid sequence identity to, with, or against a given amino acid sequence B) is calculated as follows:

100 times the fraction X/Y

where X is the number of amino acid residues scored as identical matches by the sequence alignment program ALIGN-2 in that program's alignment of A and B, and where Y is the total number of amino acid residues in B. It will be appreciated that where the length of amino acid sequence A is not equal to the length of amino acid sequence B, the % amino acid sequence identity of A to B will not equal the % amino acid sequence identity of B to A. Unless specifically stated otherwise, all % amino acid sequence identity values used herein are obtained as described in the immediately preceding paragraph using the ALIGN-2 computer program.

[0423] The term “pharmaceutical formulation” refers to a preparation which is in such form as to permit the biological activity of an active ingredient contained therein to be effective, and which contains no additional components which are unacceptably toxic to a subject to which the formulation would be administered.

[0424] A “pharmaceutically acceptable carrier” refers to an ingredient in a pharmaceutical formulation, other than an active ingredient, which is nontoxic to a subject. A pharmaceutically acceptable carrier includes, but is not limited to, a buffer, excipient, stabilizer, or preservative.

[0425] As used herein, “treatment” (and grammatical variations thereof such as “treat” or “treating”) refers to clinical intervention in an attempt to alter the natural course of the individual being treated, and can be performed either for prophylaxis or during the course of clinical pathology. Desirable effects of treatment include, but are not limited to, preventing occurrence or recurrence of disease, alleviation of symptoms, diminishment of any direct or indirect pathological consequences of the disease, preventing metastasis, decreasing the rate of disease progression, amelioration or palliation of the disease state, and remission or improved prognosis. In some embodiments, antibodies of the invention are used to delay development of a disease or to slow the progression of a disease.

[0426] The term “variable region” or “variable domain” refers to the domain of an antibody heavy or light chain that is involved in binding the antibody to antigen. The variable domains of the heavy chain and light chain (VH and VL, respectively) of a native antibody generally have similar structures, with each domain comprising four conserved framework regions (FRs) and three hypervariable regions (HVRs). (See, e.g., Kindt et al. Kuby Immunology, 6^{th} ed., W.H. Freeman and Co., page 91 (2007).) A single VH or VL domain may be sufficient to confer antigen-binding specificity. Furthermore, antibodies that bind a particular antigen may be isolated using a VH or VL domain from an antibody that binds the antigen to screen a library of complementary VL or VH domains, respectively. See, e.g., Portolano et al., J. Immunol. 150:880-887 (1993); Clarkson et al., Nature 352:624-628 (1991).

[0427] The term “vector,” as used herein, refers to a nucleic acid molecule capable of propagating another nucleic acid to which it is linked. The term includes the vector as a self-replicating nucleic acid structure as well as the vector incorporated into the genome of a host cell into which it has been introduced. Certain vectors are capable of directing the expression of nucleic acids to which they are operatively linked. Such vectors are referred to herein as “expression vectors.”

[0428] In certain embodiments, an antigen-binding molecule (or antibody) provided herein is a multispecific antibody, e.g. a bispecific antibody. Multispecific antibodies are monoclonal antibodies that have binding specificities for at least two different sites. Multispecific antibodies (e.g., bispecific antibodies) can be prepared as full length antibodies or antibody fragments.

[0429] Techniques for making multispecific antibodies include, but are not limited to, recombinant co-expression of two immunoglobulin heavy chain-light chain pairs having different specificities (see Milstein and Cuello, Nature 305: 537 (1983)), WO 93/08829, and Traunecker et al., EMBO J. 10: 3655 (1991)), and “knob-in-hole” engineering (see, e.g., U.S. Pat. No. 5,731,168). Multi-specific antibodies may also be made by engineering electrostatic steering effects for making antibody Fc-heterodimeric molecules (WO 2009/089004A1); cross-linking two or more antibodies or fragments (see, e.g., U.S. Pat. No. 4,676,980, and Brennan et al., Science, 229: 81 (1985)); using leucine zippers to produce bispecific antibodies (see, e.g., Kostelny et al., J. Immunol., 148(5):1547-1553 (1992)); using “diabody” technology for making bispecific antibody fragments (see, e.g., Hollinger et al., Proc. Natl. Acad. Sci. USA, 90:6444-6448 (1993)); and using single-chain Fv (scFv) dimers (see, e.g. Gruber et al., J. Immunol., 152:5368 (1994)); and preparing trispecific antibodies as described, e.g., in Tutt et al. J. Immunol. 147: 60 (1991).

[0430] Engineered antibodies with three or more functional antigen binding sites, including “Octopus antibodies,” are also included herein (see, e.g. US 2006/0025576A1).

[0431] The antigen-binding molecule or fragment herein also includes a “Dual Acting Fab” or “DAF” comprising an antigen binding site that binds to a specific antigen as well as another, different antigen (see, US 2008/0069820, for example).

### II. Anti-T Cell Antigen-Binding Molecules and Pharmaceutical Compositions

[0432] In one embodiment, “anti-T cell antigen-binding molecules” refer to antigen-binding molecules that bind to antigens on T cells, and include antigen-binding molecules that bind to T cell receptor complexes. In one embodiment, anti-T cell antigen-binding molecules are multispecific antigen-binding molecules. In one embodiment, anti-T cell antigen-binding molecules are bispecific antigen-binding molecules, preferably bispecific antibodies comprising “a domain comprising an antibody variable region having T cell receptor complex-binding activity” and “a domain comprising an antibody variable region having cancer antigen-binding activity”. In one embodiment, the bispecific antibodies may have a structure of a single chain antibody, such as a structure in which antibody variable regions are linked by linkers. In one embodiment, anti-T cell antigen-binding molecules further comprise an Fc region with reduced Fcγ receptor-binding activity.

[0433] Furthermore, in one embodiment, a domain comprising an antibody variable region having T cell receptor complex-binding activity is preferably a domain comprising an antibody variable region having T cell receptor-binding activity, and more preferably a domain comprising an antibody variable region having CD3-binding activity. Furthermore, in one embodiment, the above “domain comprising an antibody variable region” is provided by one or more variable domains of an antibody, and preferably the domain comprising an antibody variable region comprises an antibody light chain variable region (VL) and an antibody heavy chain variable region (VH). Suitable examples of such domains comprising antibody variable regions include various antibody fragments such as “scFv (single chain Fv)”, “single chain antibody”, “Fv”, “single chain Fv 2 (scFv2)”, “Fab”, and “F(ab′)2”.

[0434] Domain Comprising an Antibody Variable Region Having Cancer Antigen-Binding Activity

[0435] Herein, the “domain comprising an antibody variable region having cancer antigen-binding activity” refers to a portion of an antibody comprising a region that specifically binds to and is complementary to all or a part of a cancer antigen.

[0436] Herein, a “cancer-specific antigen” refers to an antigen expressed by cancer cells, which enables one to distinguish between cancer cells and healthy cells; and for example, it includes antigens that are expressed as cells become malignant, or abnormal sugar chains that appear on protein molecules or cell surface when cells become cancerous. Specific examples include GPC3; ALK receptor (pleiotrophin receptor); pleiotrophin; KS ¼ pancreas carcinoma antigen; ovarian carcinoma antigen (CA125); prostatic acid phosphate; prostate-specific antigen (PSA); melanoma-associated antigen p97; melanoma antigen gp75; high molecular weight melanoma antigen (HMW-MAA); prostate-specific membrane antigen; carcinoembryonic antigen (CEA); polymorphic epithelial mucin antigen; human milk fat globule antigen; colorectal tumor-associated antigens such as CEA, TAG-72, C017-1A, GICA 19-9, CTA-1, and LEA; Burkitt's lymphoma antigen-38.13; CD19; human B-lymphoma antigen-CD20; CD33; melanoma-specific antigens such as ganglioside GD2, ganglioside GD3, ganglioside GM2, and ganglioside GM3; tumor-specific transplantation type cell-surface antigen (TSTA); virus-induced tumor antigens including T antigen and envelope antigens of DNA tumor viruses and RNA tumor viruses; CEA of colon; oncofetal antigens such as 5T4 oncofetal trophoblast glycoprotein and bladder tumor oncofetal antigen; α-fetoprotein; differentiation antigens such as human lung carcinoma antigens L6 and L20; antigens of fibrosarcoma; human leukemia T cell antigen-Gp37; neoglycoprotein; sphingolipids; breast cancer antigens such as EGFR (epidermal growth factor receptor); NY-BR-16; NY-BR-16 and HER2 antigen (p185HER2); polymorphic epithelial mucin (PEM); malignant human lymphocyte antigen-APO-1; differentiation antigens such as I antigen found in fetal erythrocytes; primary endoderm I antigen found in adult erythrocytes; preimplantation embryos; I(Ma) found in gastric cancer; M18 and M39 found in mammary epithelium; SSEA-1, VEP8, VEP9, My1, and VIM-D5 found in myeloid cells; D156-22 found in colorectal cancer; TRA-1-85 (blood group H); SCP-1 found in testis and ovarian cancer; C14 found in colon cancer; F3 found in lung cancer; AH6 found in gastric cancer; Y hapten; Ley found in embryonal carcinoma cells; TL5 (blood group A); EGF receptor found in A431 cells; E1 series (blood group B) found in pancreatic cancer; FC10.2 found in embryonal carcinoma cells; gastric cancer antigen; CO-514 (blood group Lea) found in adenocarcinomas; NS-10 found in adenocarcinomas; CO-43 (blood group Leb); G49 found in EGF receptor of A431 cells; MH2 (blood group ALeb/Ley) found in colon cancer; 19.9 found in colon cancer; gastric cancer mucins; T5A7 found in myeloid cells; R24 found in melanoma; 4.2, GD3, D1.1, OFA-1, GM2, OFA-2, GD2, and M1:22:25:8 found in embryonal carcinoma cells as well as SSEA-3 and SSEA-4 found in 4 to 8-cell stage embryos; subcutaneous T cell lymphoma antigen; MART-1 antigen; sialyl Tn (STn) antigen; colon cancer antigen NY-CO-45; lung cancer antigen NY-LU-12 variant A; adenocarcinoma antigen ART1; paraneoplastic associated brain-testis-cancer antigen (onconeuronal antigen MA2; paraneoplastic neuronal antigen); Neuro-oncological ventral antigen 2 (NOVA2); hemocyte carcinoma antigen gene 520; tumor-associated antigen CO-029; tumor-associated antigens MAGE-C1 (cancer/testis antigen CT7), MAGE-B1 (MAGE-XP antigen), MAGE-B2 (DAM6), MAGE-2, MAGE-4a, MAGE-4b and MAGE-X2; Cancer-Testis Antigen (NY-EOS-1); YKL-40, fragments of any of the aforementioned polypeptides, or structures produced by modification thereof (for example, the above-mentioned modified phosphate group or sugar chain); EpCAM; EREG; CA19-9; CA15-3; sialyl SSEA-1(SLX); HER2; PSMA; CEA; and CLEC12A. Cancer-specific antigens which become targets of the cancer-specific antigen-binding domains of the present invention are, in particular, preferably those expressed on cell surface, and examples of such cancer-specific antigens include CD19, CD20, EGFR, HER2, EpCAM, and EREG.

[0437] A Domain Comprising an Antibody Variable Region Having Glypican 3 (GPC3)-Binding Activity

[0438] Herein, the phrase “a domain comprising an antibody variable region having glypican 3 (GPC3)-binding activity” refers to an antibody portion that comprises a region that specifically binds to the above-mentioned GPC3 protein, or to all or a portion of a partial peptide of the GPC3 protein, and is also complementary thereto.

[0439] Herein, glypican 3 (GPC3) is a protein that belongs to the glypican family, i.e., a group of heparan sulfate proteoglycans bound to cell surface via glycosylphosphatidylinositol (Filmus, J. Clin. Invest., 2001, 108, 497-501). Glypicans play an important role in cell proliferation, differentiation, and migration. GPC3 is expressed in 70% or more of hepatoma tissues obtained by surgical excision or biopsy, and is hardly or not at all expressed in neighboring nonneoplastic hepatic lesions and most adult tissues (Zhu-Zu-W, Gut, 2001, 48, 558-564, Yamauchi, Mod. Pathol., 2005, 18, 1591-1598).

[0440] A Domain Comprising an Antibody Variable Region Having T-Cell Receptor Complex-Binding Activity

[0441] Herein, the phrase “a domain comprising an antibody variable region having T-cell receptor complex-binding activity” refers to a T-cell receptor complex-binding antibody portion that comprises a region that specifically binds to all or a portion of a T-cell receptor complex and is also complementary thereto. The T-cell receptor complex may be a T-cell receptor itself, or an adaptor molecule constituting a T-cell receptor complex along with a T-cell receptor. CD3 is suitable as an adaptor molecule.

[0442] A Domain Comprising an Antibody Variable Region that has T-Cell Receptor-Binding Activity

[0443] Herein, the phrase “a domain comprising an antibody variable region having T-cell receptor-binding activity” refers to a T-cell receptor-binding antibody portion produced by including a region that specifically binds to all or a portion of a T-cell receptor and is also complementary thereto.

[0444] The portion of a T cell receptor to which the domain of the present invention binds may be a variable region or a constant region, but an epitope present in the constant region is preferred. Examples of the constant region sequence include the T cell receptor α chain of RefSeq Accession No. CAA26636.1 (SEQ ID NO: 9), the T cell receptor β chain of RefSeq Accession No. C25777 (SEQ ID NO: 10), the T cell receptor γ1 chain of RefSeq Accession No. A26659 (SEQ ID NO: 11), the T cell receptor γ2 chain of RefSeq Accession No. AAB63312.1 (SEQ ID NO: 12), and the T cell receptor δ chain of RefSeq Accession No. AAA61033.1 (SEQ ID NO: 13).

[0445] A Domain Comprising an Antibody Variable Region that has CD3-Binding Activity

[0446] Herein, the phrase “a domain comprising an antibody variable region that has CD3-binding activity” refers to a CD3-binding antibody portion produced by including a region that specifically binds to all or a portion of CD3 and is also complementary thereto.

[0447] The domain comprising an antibody variable region that has CD3-binding activity of the present invention may be any epitope-binding domain as long as the epitope exists in the γ-chain, δ-chain, or ε-chain sequence that constitutes human CD3. In the present invention, preferably, a domain comprising an anti-CD3 antibody light-chain variable region (VL) and an anti-CD3 antibody heavy-chain variable region (VH) that bind to an epitope present in the extracellular region of the E chain of the human CD3 complex is suitably used. Besides the anti-CD3 antibody light chain variable region (VL) and anti-CD3 antibody heavy chain variable region (VH) described in the Examples, various known CD3-binding domains containing a CD3-binding antibody light chain variable region (VL) and a CD3-binding antibody heavy chain variable region (VH), and those of the OKT3 antibody (Proc. Natl. Acad. Sci. USA (1980) 77, 4914-4917) are suitably used as such domains. One may appropriately use an antibody variable region-containing domain derived from the anti-CD3 antibody having desired properties, which is obtained by immunizing a desired animal by the above-mentioned method using the γ-chain, δ-chain, or ε-chain constituting the human CD3. Human antibodies and properly humanized antibodies as described above may be appropriately used as the anti-CD3 antibody to give rise to the domain containing the antibody variable region having CD3-binding activity. Regarding the structure of the γ-chain, δ-chain, or ε-chain constituting CD3, their polynucleotide sequences are shown in SEQ ID NOs: 9 (NM_000073.2), 10 (NM_000732.4), and 11 (NM_000733.3), and their polypeptide sequences are shown in SEQ ID NOs: 12 (NP_000064.1), 13 (NP_000723.1), and 14 (NP_000724.1) (the RefSeq accession number is shown in parentheses).

[0448] Antibody variable region-containing domains in antigen binding molecules of the present invention may bind to the same epitope. Herein, the same epitope may be present in a protein comprising the amino acid sequence of SEQ ID NO: 2 or 14. Alternatively, antibody variable region-containing domains in antigen binding molecules of the present invention may bind to different epitopes, respectively. Herein, the different epitopes may be present in a protein comprising the amino acid sequence of SEQ ID NO: 2 or 14.

[0449] Fc Region with Reduced Fcγ Receptor-Binding Activity

[0450] In one embodiment, “Fcγ receptor-binding activity is reduced” means, for example, that the binding activity of a test antigen-binding molecule is 50% or less, preferably 45% or less, 40% or less, 35% or less, 30% or less, 20% or less, or 15% or less, and particularly preferably 10% or less, 9% or less, 8% or less, 7% or less, 6% or less, 5% or less, 4% or less, 3% or less, 2% or less, or 1% or less than the binding activity of a control antigen-binding molecule.

[0451] Antigen-binding molecules comprising the Fc domain of a monoclonal IgG1, IgG2, IgG3, or IgG4 antibody can be appropriately used as control antigen-binding molecules. Furthermore, when an antigen-binding molecule comprising an Fc domain mutant of an antibody of a particular isotype is used as a test substance, the effect of the mutation of the mutant on the Fcγ receptor-binding activity is assessed using as a control an antigen-binding molecule comprising an Fc domain of the same isotype. As described above, antigen-binding molecules comprising an Fc domain mutant whose Fcγ receptor-binding activity has been judged to be reduced are appropriately prepared.

[0452] Such known mutants include, for example, mutants having a deletion of amino acids 231A-238S (EU numbering) (WO 2009/011941), as well as mutants C226S, C229S, P238S, (C220S) (J. Rheumatol (2007) 34, 11); C226S and C229S (Hum. Antibod. Hybridomas (1990) 1(1), 47-54); C226S, C229S, E233P, L234V, and L235A (Blood (2007) 109, 1185-1192).

[0453] Specifically, the preferred antigen-binding molecules include those comprising an Fc domain with a substitution of the amino acid at position 220, 226, 229, 231, 232, 233, 234, 235, 236, 237, 238, 239, 240, 264, 265, 266, 267, 269, 270, 295, 296, 297, 298, 299, 300, 325, 327, 328, 329, 330, 331, or 332 (EU numbering) in the amino acids forming the Fc domain of an antibody of a particular isotype. The isotype of antibody from which the Fc domain originates is not particularly limited, and it is possible to use an appropriate Fc domain derived from a monoclonal IgG1, IgG2, IgG3, or IgG4 antibody. It is preferable to use Fc domains derived from IgG1 antibodies.

[0454] The preferred antigen-binding molecules include, for example, those comprising an Fc domain which has any one of the substitutions shown below, whose positions are specified according to EU numbering (each number represents the position of an amino acid residue in the EU numbering; and the one-letter amino acid symbol before the number represents the amino acid residue before substitution, while the one-letter amino acid symbol after the number represents the amino acid residue after the substitution) in the amino acids forming the Fc domain of IgG1 antibody:

[0455] (a) L234F, L235E, P331S;

[0456] (b) C226S, C229S, P238S;

[0457] (c) C226S, C229S;

[0458] (d) C226S, C229S, E233P, L234V, L235A;

[0459] (e) L234A, L235A or L235R, N297A;

[0460] (f) L235A or L235R, S239K, N297A

as well as those having an Fc domain which has a deletion of the amino acid sequence at positions 231 to 238.

[0461] Furthermore, the preferred antigen-binding molecules also include those comprising an Fc domain that has any one of the substitutions shown below, whose positions are specified according to EU numbering in the amino acids forming the Fc domain of an IgG2 antibody:

[0462] (g) H268Q, V309L, A330S, and P331S;

[0463] (h) V234A;

[0464] (i) G237A;

[0465] (j) V234A and G237A;

[0466] (k) A235E and G237A;

[0467] (l) V234A, A235E, and G237A.

Each number represents the position of an amino acid residue in EU numbering; and the one-letter amino acid symbol before the number represents the amino acid residue before substitution, while the one-letter amino acid symbol after the number represents the amino acid residue after the substitution.

[0468] Furthermore, the preferred antigen-binding molecules also include those comprising an Fc domain that has any one of the substitutions shown below, whose positions are specified according to EU numbering in the amino acids forming the Fc domain of an IgG3 antibody:

[0469] (m) F241A;

[0470] (n) D265A;

[0471] (o) V264A.

Each number represents the position of an amino acid residue in EU numbering; and the one-letter amino acid symbol before the number represents the amino acid residue before substitution, while the one-letter amino acid symbol after the number represents the amino acid residue after the substitution.

[0472] Furthermore, the preferred antigen-binding molecules also include those comprising an Fc domain that has any one of the substitutions shown below, whose positions are specified according to EU numbering in the amino acids forming the Fc domain of an IgG4 antibody:

[0473] (p) L235A, G237A, and E318A;

[0474] (q) L235E;

[0475] (r) F234A and L235A.

Each number represents the position of an amino acid residue in EU numbering; and the one-letter amino acid symbol before the number represents the amino acid residue before substitution, while the one-letter amino acid symbol after the number represents the amino acid residue after the substitution.

[0476] The other preferred antigen-binding molecules include, for example, those comprising an Fc domain in which any amino acid at position 233, 234, 235, 236, 237, 327, 330, or 331 (EU numbering) in the amino acids forming the Fc domain of an IgG1 antibody is substituted with an amino acid of the corresponding position in EU numbering in the corresponding IgG2 or IgG4.

[0477] The preferred antigen-binding molecules also include, for example, those comprising an Fc domain in which any one or more of the amino acids at positions 234, 235, and 297 (EU numbering) in the amino acids forming the Fc domain of an IgG1 antibody is substituted with other amino acids. The type of amino acid after substitution is not particularly limited; however, the antigen-binding molecules comprising an Fc domain in which any one or more of the amino acids at positions 234, 235, and 297 are substituted with alanine are particularly preferred.

[0478] The preferred antigen-binding molecules also include, for example, those comprising an Fc domain in which an amino acid at position 265 (EU numbering) in the amino acids forming the Fc domain of an IgG1 antibody is substituted with another amino acid. The type of amino acid after substitution is not particularly limited; however, antigen-binding molecules comprising an Fc domain in which an amino acid at position 265 is substituted with alanine are particularly preferred.

[0479] Anti-Glypican 3 (GPC3)/T-Cell Receptor Complex Bispecific Antibody

[0480] In one embodiment, an anti-T cell antigen-binding molecule is a bispecific antibody comprising:
[0481] (1) a domain comprising an antibody variable region having glypican 3-binding activity;
[0482] (2) a domain comprising an antibody variable region having T-cell receptor complex-binding activity; and
[0483] (3) a domain comprising an Fc region with reduced Fcγ receptor-binding activity.
   In one embodiment, for the antibody L-chain variable regions contained in the antibody variable region having glypican 3-binding activity and the antibody variable region having T-cell receptor complex-binding activity of the present invention, it is preferable to obtain a common L chain that may provide a binding ability to the H chain having glypican3-binding activity and to the H chain having T-cell receptor complex-binding activity, and to use this as the common L-chain variable region of the bispecific antigen-binding molecule.

[0484] Examples of a preferred antibody H-chain variable region of the present disclosure contained in the antibody variable region having glypican 3-binding activity comprises the antibody H-chain variable regions of Table 1, or antibody H-chain variable regions having CDR sequences whose CDR1, CDR2, and CDR3 amino acid sequences are the same as the CDR1, CDR2, and CDR3 amino acid sequences contained in the H-chain variable regions of Table 1, or antibody H-chain variable regions which are functionally equivalent to the above-mentioned variable regions.

TABLE 1

| Sequence Name | SEQ ID NO: |
|---|---|
| H0000 | 40 |
| GCH003 | 170 |
| GCH005 | 171 |
| GCH006 | 172 |
| GCH007 | 173 |
| GCH008 | 174 |
| GCH010 | 175 |
| GCH012 | 176 |
| GCH013 | 177 |
| GCH014 | 178 |
| GCH015 | 179 |
| GCH016 | 180 |
| GCH019 | 181 |
| GCH022 | 182 |
| GCH023 | 183 |
| GCH025 | 184 |
| GCH026 | 185 |
| GCH027 | 186 |
| GCH029 | 187 |
| GCH032 | 188 |
| GCH034 | 189 |
| GCH035 | 190 |
| GCH039 | 191 |
| GCH040 | 192 |
| GCH042 | 193 |
| GCH043 | 194 |
| GCH045 | 195 |
| GCH053 | 196 |
| GCH054 | 197 |
| GCH055 | 198 |
| GCH056 | 199 |
| GCH057 | 200 |
| GCH059 | 201 |
| GCH060 | 202 |
| GCH061 | 203 |
| GCH062 | 204 |
| GCH064 | 205 |
| GCH065 | 206 |
| GCH066 | 207 |
| GCH067 | 208 |
| GCH068 | 209 |
| GCH073 | 210 |
| GCH094 | 211 |
| GCH098 | 212 |
| GCH099 | 213 |
| GCH100 | 214 |
| H0610 | 215 |

[0485] Examples of a preferred antibody variable region having T-cell receptor complex-binding activity in the present disclosure include antibody variable regions having T-cell receptor-binding activity. Of the T-cell receptors, CD3 is preferred, and CD3E is particularly preferred. Examples of an antibody H-chain variable region contained in such antibody variable regions include the antibody H-chain variable regions of Table 2, antibody H-chain variable regions having CDR sequences whose CDR1, CDR2, and CDR3 amino acid sequences are the same as the CDR1, CDR2, and CDR3 amino acid sequences contained in the antibody H-chain variable regions of Table 2, and antibody H-chain variable regions that are functionally equivalent to the above-mentioned variable regions.

TABLE 2

| Sequence Name | SEQ ID NO: |
|---|---|
| hCE115HA | 52 |
| CE115HA177 | 64 |
| CE115HA178 | 65 |
| CE115HA179 | 66 |
| CE115HA180 | 67 |
| hCE115HAa | 68 |
| TR01H006 | 69 |
| TR01H007 | 70 |
| TR01H008 | 71 |
| TR01H009 | 72 |
| TR01H010 | 73 |
| TR01H011 | 74 |
| TR01H012 | 75 |
| TR01H013 | 76 |
| TR01H014 | 77 |
| TR01H015 | 78 |
| TR01H016 | 79 |
| TR01H017 | 80 |
| TR01H018 | 81 |
| TR01H019 | 82 |
| TR01H020 | 83 |
| TR01H021 | 84 |
| TR01H022 | 85 |
| TR01H023 | 86 |
| TR01H024 | 87 |
| TR01H025 | 88 |
| TR01H026 | 89 |
| TR01H027 | 90 |
| TR01H028 | 91 |
| TR01H029 | 92 |
| TR01H030 | 93 |
| TR01H031 | 94 |
| TR01H032 | 95 |
| TR01H033 | 96 |
| TR01H034 | 97 |
| TR01H035 | 98 |
| TR01H036 | 99 |
| TR01H037 | 100 |
| TR01H038 | 101 |
| TR01H039 | 102 |
| TR01H040 | 103 |
| TR01H041 | 104 |
| TR01H042 | 105 |
| TR01H043 | 106 |
| TR01H044 | 107 |
| TR01H045 | 108 |
| TR01H046 | 109 |
| TR01H047 | 110 |
| TR01H048 | 111 |
| TR01H049 | 112 |
| TR01H050 | 113 |
| TR01H051 | 114 |
| TR01H052 | 115 |
| TR01H053 | 116 |
| TR01H054 | 117 |
| TR01H055 | 118 |
| TR01H056 | 119 |
| TR01H057 | 120 |
| TR01H058 | 121 |
| TR01H061 | 122 |
| TR01H062 | 123 |
| TR01H063 | 124 |
| TR01H064 | 125 |
| TR01H065 | 126 |
| TR01H066 | 127 |
| TR01H067 | 128 |
| TR01H068 | 129 |
| TR01H069 | 130 |
| TR01H070 | 131 |
| TR01H071 | 132 |
| TR01H072 | 133 |
| TR01H073 | 134 |
| TR01H074 | 135 |
| TR01H075 | 136 |
| TR01H076 | 137 |
| TR01H077 | 138 |
| TR01H079 | 139 |
| TR01H080 | 140 |
| TR01H081 | 141 |
| TR01H082 | 142 |
| TR01H083 | 143 |
| TR01H084 | 144 |
| TR01H090 | 145 |
| TR01H091 | 146 |
| TR01H092 | 147 |
| TR01H093 | 148 |
| TR01H094 | 149 |
| TR01H095 | 150 |
| TR01H096 | 151 |
| TR01H097 | 152 |
| TR01H098 | 153 |
| TR01H099 | 154 |
| TR01H100 | 155 |
| TR01H101 | 156 |
| TR01H102 | 157 |
| TR01H103 | 158 |
| TR01H104 | 159 |
| TR01H105 | 160 |
| TR01H106 | 161 |
| TR01H107 | 162 |
| TR01H108 | 163 |
| TR01H109 | 164 |
| TR01H110 | 165 |
| TR01H111 | 166 |
| TR01H112 | 167 |
| TR01H113 | 168 |
| TR01H114 | 169 |
| TR01H001 | 420 |
| TR01H002 | 421 |
| TR01H003 | 422 |
| TR01H004 | 423 |
| rCE115H | 424 |
| CE115HA121 | 425 |
| CE115HA122 | 426 |
| CE115HA124 | 427 |
| CE115HA192 | 428 |
| CE115HA236 | 429 |
| CE115HA251 | 430 |
| CE115HA252 | 431 |

[0486] The relationship between the CDR regions of the amino acid residues constituting the antibody H chain amino acid sequence and Kabat numbering is as shown in FIG. 2.

[0487] Examples of the common L-chain variable region to be used in the present invention include the L-chain variable regions of Table 3, antibody L-chain variable regions having CDR sequences whose CDR1, CDR2, and CDR3 amino acid sequences are the same as the CDR1, CDR2, and CDR3 amino acid sequences contained in the antibody L-chain variable regions of Table 3, and antibody L-chain variable regions that are functionally equivalent to the above-mentioned variable regions.

TABLE 3

| Sequence Name | SEQ ID NO: |
|---|---|
| L0000 | 53 |
| L0002 | 217 |
| L0003 | 218 |
| L0006 | 219 |
| L0007 | 220 |
| L0008 | 221 |
| L0009 | 222 |
| L0011 | 223 |
| L0012 | 224 |
| L0013 | 225 |
| L0014 | 226 |
| L0015 | 227 |
| L0016 | 228 |
| L0032 | 229 |
| L0038 | 230 |
| L0039 | 231 |
| L0041 | 232 |
| L0042 | 233 |
| L0043 | 234 |
| L0044 | 235 |
| L0045 | 236 |
| L0046 | 237 |
| L0047 | 238 |
| L0062 | 239 |
| L0063 | 240 |
| L0064 | 241 |
| L0065 | 242 |
| L0066 | 243 |
| L0069 | 244 |
| L0075 | 245 |
| L0079 | 246 |
| L0082 | 247 |
| L0085 | 248 |
| L0089 | 249 |
| L0090 | 250 |
| L0091 | 251 |
| L0093 | 252 |
| L0104 | 253 |
| L0106 | 254 |
| L0107 | 255 |
| L0109 | 256 |
| L0113 | 257 |
| L0115 | 258 |
| L0117 | 259 |
| L0120 | 260 |
| L0122 | 261 |
| L0123 | 262 |
| L0124 | 263 |
| L0125 | 264 |
| L0126 | 265 |
| L0127 | 266 |
| L0129 | 267 |
| L0132 | 268 |
| L0134 | 269 |
| L0136 | 270 |
| L0137 | 271 |
| L0138 | 272 |
| L0139 | 273 |
| L0140 | 274 |
| L0141 | 275 |
| L0143 | 276 |
| L0144 | 277 |
| L0145 | 278 |
| L0147 | 279 |
| L0148 | 280 |
| L0149 | 281 |
| L0151 | 282 |
| L0152 | 283 |
| L0154 | 284 |
| L0155 | 285 |
| L0157 | 286 |
| L0160 | 287 |
| L0161 | 288 |
| L0163 | 289 |
| L0167 | 290 |
| L0168 | 291 |
| L0173 | 292 |
| L0175 | 293 |
| L0180 | 294 |
| L0181 | 295 |
| L0186 | 296 |
| L0187 | 297 |
| L0200 | 298 |
| L0201 | 299 |
| L0202 | 300 |
| L0203 | 301 |
| L0204 | 302 |
| L0205 | 303 |
| L0206 | 304 |
| L0207 | 305 |
| L0208 | 306 |
| L0209 | 307 |
| L0210 | 308 |
| L0211 | 309 |
| L0212 | 310 |
| L0213 | 311 |
| L0214 | 312 |
| L0215 | 313 |
| L0216 | 314 |
| L0217 | 315 |
| L0218 | 316 |
| L0219 | 317 |
| L0220 | 318 |
| L0222 | 319 |
| L0223 | 320 |
| L0224 | 321 |
| L0226 | 322 |
| L0227 | 323 |
| L0228 | 324 |
| L0229 | 325 |
| L0230 | 326 |
| L0231 | 327 |
| L0232 | 328 |
| L0233 | 329 |
| L0234 | 330 |
| L0235 | 331 |
| L0236 | 332 |
| L0237 | 333 |
| L0238 | 334 |
| L0239 | 335 |
| L0240 | 336 |
| L0241 | 337 |
| L0242 | 338 |
| L0243 | 339 |
| L0246 | 340 |
| L0247 | 341 |
| L0248 | 342 |
| L0249 | 343 |
| L0250 | 344 |
| L0258 | 345 |
| L0259 | 346 |
| L0260 | 347 |
| L0261 | 348 |
| L0262 | 349 |
| L0263 | 350 |
| L0264 | 351 |
| L0265 | 352 |
| L0266 | 353 |
| L0267 | 354 |
| L0268 | 355 |
| L0269 | 356 |
| L0270 | 357 |
| L0271 | 358 |
| L0272 | 359 |

[0488] The relationship between the CDR regions of the amino acid residues constituting the antibody L-chain amino acid sequence and Kabat numbering is as shown in FIG. 3.

[0489] In preferred embodiment, examples of a combination of the antibody variable region having glypican 3-binding activity and the antibody variable region having T-cell receptor complex binding activity, include the combinations of antibody H-chain variable regions shown in Table 4, combinations of antibody H-chain variable regions having CDR sequences whose CDR1, CDR2, and CDR3 amino acid sequences are the same as the CDR1, CDR2, and CDR3 amino acid sequences carried by the antibody H-chain variable regions of Table 4, and combinations of antibody H-chain variable regions functionally equivalent to these variable regions.

TABLE 4

| GPC3 side/T cell receptor complex side | SEQ ID NO: |
|---|---|
| H0000/hCE115HA | 40/52 |
| H0000/CE115HA251 | 40/500 |
| H0000/CE115HA236 | 40/429 |
| H0000/TR01H002 | 40/421 |
| H0000/CE115HA122 | 40/426 |
| H0610/rCE115H | 215/424 |
| H0610/TR01H040 | 215/103 |
| H0610/TR01H061 | 215/122 |
| H0610/TR01H068 | 215/129 |
| H0610/TR01H071 | 215/132 |
| GCH054/TR01H067 | 197/128 |
| GCH094/TR01H082 | 211/142 |
| GCH094/TR01H084 | 211/144 |
| GCH065/TR01H084 | 206/144 |
| GCH065/TR01H082 | 206/142 |
| GCH094/TR01H109 | 211/164 |
| GCH065/TR01H109 | 206/164 |
| GCH094/TR01H113 | 211/168 |
| GCH065/TR01H113 | 206/168 |

[0490] A preferred common L chain for the above combinations of an antibody variable region having glypican 3-binding activity and an antibody variable region having T-cell receptor complex binding activity includes, for example, L0000, L0011, L0201, L0203, L0204, L0206, L0208, L0209, L0211, L0212, L0222, and a common L chain having CDR sequences (CDR1, CDR2, and CDR3 amino acid sequences) identical to the CDR1, CDR2, and CDR3 amino acid sequences as in the above common L chain. Specific preferred combinations include, for example, the combinations of antibody H-chain variable regions and a common L chain shown in Table 5, combinations of antibody variable regions having CDR sequences (CDR1, CDR2, and CDR3 amino acid sequences) identical to the amino acid sequences of CDR1, CDR2, and CDR3 carried by the antibody variable regions and a common L chain of Table 5, and combinations of antibody H-chain variable regions and a common L chain functionally equivalent to these variable regions.

TABLE 5

| GPC3 side/T cell receptor complex side/common L chain | SEQ ID NO: |
|---|---|
| H0610/rCE115H/L0000 | 215/424/53 |
| H0610/TR01H040/L0000 | 215/103/53 |
| H0610/TR01H040/L0201 | 215/103/299 |
| H0610/TR01H040/L0203 | 215/103/301 |
| H0610/TR01H040/L0204 | 215/103/302 |
| H0610/TR01H040/L0206 | 215/103/304 |
| H0610/TR01H040/L0208 | 215/103/306 |
| H0610/TR01H040/L0209 | 215/103/307 |
| H0610/TR01H040/L0211 | 215/103/309 |
| H0610/TR01H061/L0000 | 215/122/53 |
| H0610/TR01H068/L0000 | 215/129/53 |
| H0610/TR01H071/L0000 | 215/132/53 |
| GCH054/TR01H067/L0201 | 197/128/299 |
| GCH054/TR01H067/L0212 | 197/128/310 |
| GCH054/TR01H067/L0222 | 197/128/319 |
| GCH054/TR01H067/L0000 | 197/128/53 |
| GCH094/TR01H082/L0201 | 211/142/299 |
| GCH094/TR01H082/L0011 | 211/142/223 |
| GCH094/TR01H084/L0011 | 211/144/223 |
| GCH065/TR01H084/L0011 | 206/144/223 |
| GCH065/TR01H082/L0011 | 206/142/223 |
| GCH094/TR01H109/L0011 | 211/164/223 |
| GCH065/TR01H109/L0011 | 206/164/223 |
| GCH094/TR01H113/L0011 | 211/168/223 |
| GCH065/TR01H113/L0011 | 206/168/223 |

[0491] The Fc region comprised in the anti-T cell antigen-binding molecule (preferably the bispecific antibody) is not particularly limited as long as it is an Fc region having reduced Fcγ receptor-binding activity, but examples of a preferred Fc region include a combination of the Fc-region portion of E22Hh and the Fc-region portion of E22Hk, a combination of the Fc-region portion of E2702GsKsc and the Fc-region portion of E2704sEpsc, and a combination of the Fc-region portion of E2702sKsc and the Fc-region portion of E2704sEpsc.

[0492] In one embodiment, the anti-T cell antigen-binding molecule of the present disclosure is ERY974. ERY974 is a bispecific antibody comprising (1) a domain comprising an antibody variable region having glypican 3-binding activity, (2) a domain comprising an antibody variable region having T cell receptor complex-binding activity, and (3) a domain comprising an Fc region with reduced Fcγ receptor-binding activity. This bispecific antibody comprises TRO1H113 (SEQ ID NO: 168) as the CD3-side heavy chain variable region, E2702sKsc (SEQ ID NO: 62) as the CD3-side heavy chain constant region, GCH065 (SEQ ID NO: 206) as the GPC3-side heavy chain variable region, E2704sEpsc (SEQ ID NO: 61) as the GPC3-side heavy chain constant region, L0011 (SEQ ID NO: 223) as the common light chain variable region, and k0 (SEQ ID NO: 63) as the common light chain constant region. In another embodiment, of ERY974, the CD3-side heavy chain comprises the amino acid sequence of SEQ ID NO: 402, the GPC3-side heavy chain comprises the amino acid sequence of SEQ ID NO: 385, and the common light chain comprises the amino acid sequence of SEQ ID NO: 410, respectively.

[0493] In one embodiment, amino acids contained in the amino acid sequences of the present disclosure may be subjected to post-translational modification. Modification well-known to those skilled in the art is, for example, conversion of an N-terminal glutamine residue (Q) to pyroglutamic acid (pGlu) by pyroglutamylation. Even when amino acids are post-translationally modified this way, they are, of course, included in the amino acid sequences described in the present disclosure.

[0494] Other preferred anti-T cell antigen-binding molecules in the present disclosure include bispecific antibodies having an antibody variable region having glypican 3-binding activity and an antibody variable region having CD3ε-binding activity. More preferably, the cytotoxic activity is equal to or higher than that of the bispecific antibody GPC3_ERY22_rCE115 (disclosed in Example 1 of WO2015156268). Examples of such bispecific antibodies include the bispecific antibody having an H chain and an L chain described in Example 3 (Table 13) of WO2015156268, or a bispecific antibody that binds to an epitope overlapping with an epitope to which the antibody binds and has an Fc region with reduced Fcγ receptor-binding activity.

[0495] In the present disclosure, the phrase “functionally equivalent” means that the binding affinities for an antigen are equivalent, or alternatively, it means that the cytotoxic activities against glypican 3-expressing cells or tissues containing these cells are equivalent when it is used as a bispecific antibody. The binding affinity and cytotoxic activity can be measured based on the description herein. The cells used for measurement of cytotoxic activity may be the desired GPC3-expressing cells or a desired tissue containing these cells, and for example, PC-10 or NCI-H446 which are GPC3-expressing human cancer cell lines can be used. Regarding the antibody constant regions, the phrase may mean that the decreases in Fcγ receptor-binding activity are equivalent.

[0496] For example, an antibody H-chain variable region functionally equivalent to the antibody H chain variable region described herein (i.e., the original H chain variable region) means that this region has the same binding affinity when it is combined with the antibody L-chain variable region described herein which forms a pair with the original H chain, or alternatively that the region has the same cytotoxic activity towards glypican 3-expressing cells or a tissue containing these cells when used for a bispecific antibody. Furthermore, an antibody L-chain variable region functionally equivalent to the antibody L-chain variable region described herein (i.e., the original L-chain variable region) means that this region has the same binding affinity when it is combined with the antibody H-chain variable region described herein which forms a pair with the original L chain, or alternatively that the region has the same cytotoxic activity towards glypican 3-expressing cells or a tissue containing these cells when used for a bispecific antibody.

[0497] The term “equivalent” does not necessarily have to mean the same degree of activity, and the activity may be enhanced. Specifically, for antigen-binding affinity, examples include the case where the value (KD value/parent KD value) obtained by comparison to the binding affinity of the antibody variable region serving as the control (parent KD value) is 1.5 or less. The value of KD value/parent KD value is preferably 1.3 or less, more preferably 1.2 or less, 1.1 or less, 1.0 or less, 0.9 or less, 0.8 or less, 0.7 or less, 0.6 or less, or 0.5 or less. While there is no lower limit, examples include 10⁻¹, 10⁻², 10⁻³, 10⁻⁴, 10⁻⁵, or 10⁻⁶. More specifically, in the present invention, the value of KD value/parent KD value is preferably 10⁻⁶ to 1.5×10⁻⁰, more preferably 10⁻⁶ to 10⁻¹, even more preferably 10⁻⁶ to 10⁻², and yet even more preferably 10⁻⁶ to 10⁻³. For cytotoxic activity, examples include the case where the value (cell growth inhibition rate/parent cell growth inhibition rate) obtained by comparison to the cell growth inhibition rate of the bispecific antibody serving as the control (parent cell growth inhibition rate) is 0.7 or more. The concentration of the added multispecific antigen-binding molecule can be determined appropriately, but is preferably, for example, 0.01 nM, 0.05 nM, 0.1 nM, 0.5 nM, or 1 nM; and preferably, measurements are taken at 0.05 nM or 0.1 nM. The value for cell growth inhibition rate/parent cell growth inhibition rate is preferably 0.8 or higher, more preferably 0.9 or higher, 1.0 or higher, 1.2 or higher, 1.5 or higher, 2 or higher, 3 or higher, 5 or higher, 10 or higher, or 20 or higher. While there is no upper limit, the value may be 10, 10², 10³, 10⁴, 10⁵, or 10⁶.

[0498] Furthermore, for cytotoxic activity, examples include the case where the value (concentration for 50% inhibition of cell growth/parent concentration for 50% inhibition of cell growth) obtained by comparison to the concentration of the original bispecific antibody for 50% inhibition of cell growth (parent concentration for 50% inhibition of cell growth) is 1.5 or less. Concentration for 50% growth inhibition refers to the concentration of the multispecific antigen-binding molecule necessary for reducing the cell proliferation rate to one half compared to when the multispecific antigen-binding molecule is not added. The value of “concentration for 50% inhibition of cell growth/parent concentration for 50% inhibition of cell growth” is preferably 1.3 or less, more preferably 1.2 or less, 1.1 or less, 1.0 or less, 0.9 or less, 0.8 or less, 0.7 or less, 0.6 or less, or 0.5 or less. While there is no lower limit, the value may be, for example, 10-1, 10-2, 10⁻³, 10⁻⁴, 10⁻⁵, or 10⁻⁶. Specifically, the value is preferably 10⁻⁶ to 1.5×10⁻⁰, more preferably 10⁻⁶ to 10⁻¹, even more preferably 10⁻⁶ to 10⁻², and yet even more preferably 10⁻⁶ to 10⁻³.

[0499] Regarding the domain comprising an antibody variable region having GPC3-binding activity, the KD value towards GPC3 (for example, human GPC3) may be, for example, 5×10⁻⁹ M or less, preferably 4×10⁻⁹ M or less, such as 3×10⁻⁹ M or less, 2×10⁻⁹ M or less, 1×10⁻⁹ M or less, 8×10⁻¹⁰ M or less, 5×10⁻¹⁰ M or less, 4×10⁻¹⁰ M or less, 3×10⁻¹⁰ M or less, 2×10⁻¹⁰ M or less, 1×10⁻¹⁰ M or less, 8×10⁻¹¹ M or less, 5×10⁻¹¹ M or less, 4×10⁻¹¹ M or less, 3×10⁻¹¹ M or less, 2×10⁻¹¹ M or less, 1×10⁻¹¹ M or less, 8×10⁻¹² M or less, 5×10⁻¹² M or less, 4×10⁻¹² M or less, 3×10⁻¹² M or less, 2×10⁻¹² M or less, 1×10⁻¹² M or less, 8×10⁻¹³ M or less, 5×10⁻¹³ M or less, 4×10⁻¹³ M or less, 3×10⁻¹³ M or less, 2×10⁻¹³ M or less, or 1×10⁻¹³ M or less.

[0500] Regarding the domain comprising an antibody variable region having T-cell receptor complex-binding activity, the KD value towards a human T-cell receptor complex such as a human T cell receptor, or more specifically for example human CD3ε may be, for example, 2×10⁻⁷ M or less, preferably 1.5×10⁻⁷ M or less, such as 1.4×10⁻⁷ M or less, 1.3×10⁻⁷ M or less, 1.2×10⁻⁷ M or less, 1×10⁻⁷ M or less, 3×10⁻⁸ M or less, 2×10⁻⁸ M or less, 1×10⁻⁸ M or less, 8×10⁻⁹ M or less, 5×10⁻⁹ M or less, 4×10⁻⁹ M or less, 3×10⁻⁹ M or less, 2×10⁻⁹ M or less, 1×10⁻⁹ M or less, 8×10⁻¹⁰ M or less, 5×10⁻¹⁰ M or less, 4×10⁻¹⁰ M or less, 3×10⁻¹⁰ M or less, 2×10⁻¹⁰ M or less, 1×10⁻¹⁰ M or less, 8×10⁻¹¹ M or less, 5×10⁻¹¹ M or less, 4×10⁻¹¹ M or less, 3×10⁻¹¹ M or less, 2×10⁻¹¹ M or less, 1×10⁻¹¹ M or less, 8×10⁻¹² M or less, 5×10⁻¹² M or less, 4×10⁻¹² M or less, 3×10⁻¹² M or less, 2×10⁻¹² M or less, or 1×10⁻¹² M or less.

[0501] The bispecific antibodies of the present disclosure preferably have KD values toward human GPC3 and human T-cell receptor complex (for example, human CD3ε chain) that are 5×10⁻⁹ M or less and 2×10⁻⁷ M or less, respectively, and more preferably 1×10⁻⁹ M or less and 5×10⁻⁸ M or less, respectively.

[0502] In the present invention, antibody variable regions that are “functionally equivalent” are not particularly limited as long as they are antibody H-chain and/or antibody L-chain variable regions that satisfy the above-described conditions. Examples of such antibody variable regions include regions produced by introducing substitution, deletion, addition, and/or insertion of one or more amino acids (for example, 1, 2, 3, 4, 5, or 10 amino acids) into the amino acid sequences of the variable regions of Tables 1 to 3 mentioned above. A method well known to those skilled in the art for introducing one or more amino-acid substitutions, deletions, additions, and/or insertions into an amino acid sequence is a method of introducing mutations into proteins. For example, those skilled in the art can prepare variable regions that are functionally equivalent to the antibody variable regions having the above-mentioned functions by appropriately introducing mutations into amino acid sequences using methods such as site-directed mutagenesis (Hashimoto-Gotoh, T., Mizuno, T., Ogasahara, Y., and Nakagawa, M. (1995) An oligodeoxyribonucleotide-directed dual amber method for site-directed mutagenesis. Gene 152, 271-275; Zoller, M. J., and Smith, M. (1983) Oligonucleotide-directed mutagenesis of DNA fragments cloned into M13 vectors. Methods Enzymol. 100, 468-500; Kramer, W., Drutsa, V., Jansen, H. W., Kramer, B., Pflugfelder, M., and Fritz, H. J. (1984) The gapped duplex DNA approach to oligonucleotide-directed mutation construction. Nucleic Acids Res. 12, 9441-9456; Kramer, W., and Fritz, H. J. (1987) Oligonucleotide-directed construction of mutations via gapped duplex DNA Methods. Enzymol. 154, 350-367; and Kunkel, T. A. (1985) Rapid and efficient site-specific mutagenesis without phenotypic selection. Proc Natl Acad. Sci. USA. 82, 488-492).

[0503] When an amino acid residue is altered, the amino acid is preferably mutated into a different amino acid(s) that conserves the properties of the amino acid side-chain. Examples of amino-acid side chain properties are: hydrophobic amino acids (A, I, L, M, F, P, W, Y, and V), hydrophilic amino acids (R, D, N, C, E, Q, G, H, K, S, and T), amino acids containing aliphatic side chains (G, A, V, L, I, and P), amino acids containing hydroxyl group-containing side chains (S, T, and Y), amino acids containing sulfur atom-containing side chains (C and M), amino acids containing carboxylic acid- and amide-containing side chains (D, N, E, and Q), amino acids containing basic side chains (R, K, and H), and amino acids containing aromatic side chains (H, F, Y, and W) (amino acids are represented by one-letter codes in parentheses) Amino acid substitutions within each of these groups are called conservative substitutions. It is already known that a polypeptide containing a modified amino acid sequence in which one or more amino acid residues in a given amino acid sequence are deleted, added, and/or substituted with other amino acids can retain the original biological activity (Mark, D. F. et al., Proc. Natl. Acad. Sci. USA; (1984) 81: 5662-6; Zoller, M. J. and Smith, M., Nucleic Acids Res. (1982) 10: 6487-500; Wang, A. et al., Science (1984) 224: 1431-3; Dalbadie-McFarland, G. et al., Proc. Natl. Acad. Sci. USA (1982) 79: 6409-13). Variable regions of the present invention containing such amino acid modifications have an amino acid sequence identity of at least 70%, more preferably at least 75%, even more preferably at least 80%, still more preferably at least 85%, yet more preferably at least 90%, and most preferably at least 95%, with the amino acid sequence of the CDR sequences, FR sequences, or whole variable regions of the variable region prior to modification. Herein, sequence identity is defined as the percentage of residues identical to those in the original amino acid sequence of the H-chain variable region or L-chain variable region determined after the sequences are aligned, and gaps are appropriately introduced to maximize the sequence identity as necessary. The identity of amino acid sequences can be determined by the method described below.

[0504] Furthermore, a “functionally equivalent antibody variable region” can be obtained, for example, from nucleic acids that hybridize under stringent conditions with nucleic acids comprising a nucleotide sequence encoding the amino acid sequence of a variable region in Tables 1 to 3 mentioned above. Stringent hybridization conditions for isolating a nucleic acid that hybridizes under stringent conditions with a nucleic acid comprising a nucleotide sequence encoding the amino acid sequence of a variable region include, for example, the conditions of 6 M urea, 0.4% SDS, 0.5×SSC, and 37° C., or hybridization conditions with a stringency equivalent thereto. Isolation of nucleic acids with a much higher homology can be expected with more stringent conditions, for example, the conditions of 6 M urea, 0.4% SDS, 0.1×SSC, and 42° C. The washing conditions following the hybridization are, for example, washing using 0.5×SSC (1×SSC is 0.15 M NaCl and 0.015 M sodium citrate at pH 7.0) and 0.1% SDS at 60° C., more preferably washing using 0.2×SSC and 0.1% SDS at 60° C., even more preferably washing using 0.2×SSC and 0.1% SDS at 62° C., yet even more preferably washing using 0.2×SSC and 0.1% SDS at 65° C., and still more preferably washing using 0.1×SSC and 0.1% SDS at 65° C. The sequences of the isolated nucleic acids can be determined by the known methods described below. The overall nucleotide sequence homology of the isolated nucleic acid is at least 50% or higher, preferably 70% or higher, and more preferably 90% or higher (for example, 95%, 96%, 97%, 98%, 99%, or higher) sequence identity.

[0505] Nucleic acids that hybridize under stringent conditions to a nucleic acid comprising a nucleotide sequence encoding the amino acid sequence of a variable region can also be isolated by using, instead of the above-described methods using hybridization techniques, gene amplification methods such as polymerase chain reaction (PCR) that uses primers synthesized based on information of the nucleotide sequence encoding the variable-region amino acid sequence.

[0506] The identity of one nucleotide sequence or amino acid sequence to another can be determined using the algorithm BLAST, by Karlin and Altschul (Proc. Natl. Acad. Sci. USA (1993) 90: 5873-7). Programs called BLASTN and BLASTX were developed based on this algorithm (Altschul et al., J. Mol. Biol. (1990) 215: 403-10). To analyze nucleotide sequences according to BLASTN based on BLAST, the parameters are set, for example, as score=100 and wordlength=12. On the other hand, parameters used for the analysis of amino acid sequences by BLASTX based on BLAST include, for example, score=50 and wordlength=3. Default parameters for each program are used when using the BLAST and Gapped BLAST programs. Specific techniques for such analyses are known in the art (see the website of the National Center for Biotechnology Information (NCBI), Basic Local Alignment Search Tool (BLAST); http://www.ncbi.nlm nih.gov).

[0507] Pharmaceutical Compositions Comprising an Anti-T Cell Antigen-Binding Molecule

[0508] From another viewpoint, the present disclosure provides pharmaceutical compositions comprising as the active ingredient an anti-T cell antigen-binding molecule, preferably a bispecific antibody that comprises: (1) a domain comprising an antibody variable region having glypican 3-binding activity, (2) a domain comprising an antibody variable region having T-cell receptor complex-binding activity, and (3) a domain comprising an Fc region with reduced binding activity towards an Fcγ receptor. Furthermore, the present disclosure relates to pharmaceutical compositions that induce cell injury, which comprise the anti-T cell antigen-binding molecule as an active ingredient. Pharmaceutical compositions of the present disclosure which induce the described cell injury, particularly T-cell-dependent cellular cytotoxicity, are preferably administered to an individual suffering from a disease for which the activities are needed for prevention or treatment, or an individual in which the disease is possible to relapse.

[0509] Furthermore, in the present disclosure, cytotoxicity-inducing agents and cell growth-inhibiting agents comprising as the active ingredient a multispecific antigen-binding molecule that comprises:
[0510] (1) a domain comprising an antibody variable region having glypican 3-binding activity,
[0511] (2) a domain comprising an antibody variable region having T-cell receptor complex-binding activity, and
[0512] (3) a domain comprising an Fc region with reduced binding activity towards an Fcγ receptor can be presented as a method for inducing cell injury which comprises the step of administering the anti-T cell antigen-binding molecule to an individual, or it can be presented as use of the anti-T cell antigen-binding molecule in the manufacture of a cytotoxicity-inducing agent and a cell growth-inhibiting agent.

[0513] In the present disclosure “comprising as the active ingredient a multispecific antigen-binding molecule that comprises (1) a domain comprising an antibody variable region having glypican 3-binding activity, (2) a domain comprising an antibody variable region having T-cell receptor complex-binding activity, and (3) a domain comprising an Fc region with reduced binding activity towards an Fcγ receptor” means comprising the anti-T cell antigen-binding molecule as a major active component, without limitation to the content ratio of the anti-T cell antigen-binding molecule.

[0514] If necessary, anti-T cell antigen-binding molecules, preferably bispecific antibodies of the present invention may be encapsulated in microcapsules (e.g., those made of hydroxymethylcellulose, gelatin, and poly(methylmetacrylate)), or incorporated as components of a colloidal drug delivery system (e.g., liposomes, albumin microspheres, microemulsion, nanoparticles, and nanocapsules) (see, for example, “Remington's Pharmaceutical Science 16th edition”, Oslo Ed. (1980)). Methods for preparing the pharmaceutical agents as controlled-release pharmaceutical agents are also well known, and such methods may be applied to the anti-T cell antigen-binding molecules of the present invention (J. Biomed. Mater. Res. (1981) 15: 267-277; Chemtech. (1982) 12: 98-105; U.S. Pat. No. 3,773,719; European Patent Application Publication Nos. EP 58,481 and EP 133,988; Biopolymers (1983) 22: 547-556).

[0515] The pharmaceutical compositions comprising the anti-T cell antigen-binding molecule of the present disclosure may be administered to patients by oral or parenteral administration, and parenteral administration is preferred. Specific examples of the administration method include administration by injection, transnasal administration, transpulmonary administration, and transdermal administration. Examples of administration by injection include intravenous injection, intramuscular injection, intraperitoneal injection, and subcutaneous injection. A pharmaceutical composition of the present invention or a cytotoxicity-inducing agent and a cell growth-inhibiting agent can be administered systemically or locally, for example, through administration by injection. The method of administration can be selected appropriately according to the age and symptoms of the patient. The dose can be selected from the range of 0.0001 mg to 1000 mg per kilogram body weight for a single administration. Alternatively, for example, the dose may be selected from the range of 0.001 mg/body to 100000 mg/body per patient. However, the pharmaceutical compositions of the present invention or a cytotoxicity-inducing agent and cell growth-inhibiting agent are not limited to these doses.

[0516] The pharmaceutical compositions comprising the anti-T cell antigen-binding molecule of the present disclosure can be formulated according to conventional methods (for example, Remington's Pharmaceutical Science, latest edition, Mark Publishing Company, Easton, U.S.A.), and may also contain pharmaceutically acceptable carriers and additives. Examples include, but are not limited to surfactants, excipients, coloring agents, perfumes, preservatives, stabilizers, buffers, suspending agents, isotonization agents, binders, disintegrants, lubricants, fluidity promoting agents, and flavoring agents; and other commonly used carriers can be suitably used. Specific examples of the carriers include light anhydrous silicic acid, lactose, crystalline cellulose, mannitol, starch, carmellose calcium, carmellose sodium, hydroxypropyl cellulose, hydroxypropyl methyl cellulose, polyvinylacetal diethylaminoacetate, polyvinylpyrrolidone, gelatin, medium chain fatty acid triglyceride, polyoxyethylene hardened castor oil 60, saccharose, carboxymethyl cellulose, corn starch, inorganic salt, and such.

[0517] In one embodiment, the present disclosure relates to pharmaceutical compositions comprising an anti-T cell antigen-binding molecule, such as a bispecific antibody, or preferably a bispecific antibody that binds to a cancer antigen and CD3, wherein the pharmaceutical composition is for use in its combination therapy with a cytokine inhibitor. In one embodiment, the cytokine inhibitor is an IL6 inhibitor, preferably an anti-human IL-6 receptor antibody, and most preferably Tocilizumab. Details of the combination therapy are disclosed in “V. Combination therapies” herein.

### III. Cytokine Inhibitors

[0518] In one embodiment, a “cytokine inhibitor” or “cytokine antagonist” refers to a substance capable of inhibiting or inactivating cytokines, or reducing the expression level or activity level of cytokines. A cytokine inhibitor is, for example, a compound that binds to cytokines and partially or completely blocks their activity, reduces, prevents, delays activation of, inactivates, or desensitizes them, or down-regulates their activity or expression, such as an antagonist. In another example, a cytokine inhibitor is a compound that binds to cytokine receptors or inhibit the binding of cytokines to receptors to partially or completely block the activity of cytokines, reduce, prevent, delay the activation of, inactivate, or desensitize the cytokines, or down-regulate the activity. Cytokine inhibitors include polypeptide inhibitors such as antigen-binding molecules, antibodies, antibody derivatives, antibody fragments, and soluble receptors, and their derivatives; nucleic acid inhibitors such as siRNAs or antisense RNAs, and their derivatives; genetically modified forms of soluble factors such as forms having altered activity; as well as naturally occurring and synthetic soluble factor antagonists; and small molecule compounds, but are not limited thereto.

[0519] In one embodiment, the cytokine inhibitor is an inhibitor of one or more cytokines selected from IL-1β, IL-2, IL-4, IL-5, IL-6, IL-8, IL-10, IL-12, IL-13, IL-15, IL-17, IL-1Ra, IL-2R, IFN-α, IFN-γ, MIP-1α, MIP-1β, MCP-1, TNFα, GM-CSF, G-CSF, CXCL9, CXCL10, CXCR factor, VEGF, RANTES, eotaxin, EGF, HGF, FGF-β, CD30, CD30L, CD40, CD40L, ferritin, and RAGE. In one embodiment, the cytokine inhibitor is an antibody, antibody derivative, or antibody fragment that binds to one or more cytokines selected from IL-1β, IL-2, IL-4, IL-5, IL-6, IL-8, IL-10, IL-12, IL-13, IL-15, IL-17, IL-1Ra, IL-2R, IFN-α, IFN-γ, MIP-1α, MIP-1β, MCP-1, TNFα, GM-CSF, G-CSF, CXCL9, CXCL10, CXCR factor, VEGF, RANTES, eotaxin, EGF, HGF, FGF-β, CD30, CD30L, CD40, CD40L, ferritin, and RAGE, or receptors thereof. In one embodiment, the cytokine inhibitor is an inhibitor of a cytokine whose plasma concentration increases when cytokine release syndrome (CRS) develops in an individual. Preferably, the cytokine inhibitor is an IL-6 inhibitor, and more preferably, it is an anti-IL-6 receptor antibody. Most preferably, the cytokine inhibitor is Tocilizumab.

[0520] IL-6 Inhibitors

[0521] In one embodiment, a cytokine inhibitor is an inhibitor of IL-6 signaling, such as an inhibitor of IL-6 or IL-6 receptor. In one embodiment, an inhibitor may be an anti-IL-6 antigen-binding molecule, an anti-IL-6 antibody (including a chimeric, humanized, or human anti-IL-6 antibody), or an antigen-binding fragment thereof or an antibody derivative thereof. In another embodiment, an inhibitor may be an anti-IL-6 receptor (IL-6R) antigen-binding molecule, an anti-IL-6R antibody (including a chimeric, humanized, or human anti-IL-6R antibody), or an antigen-binding fragment thereof or an antibody derivative thereof. In one embodiment, these inhibitors may be a soluble gp130 (sgp130) or a fragment thereof that can block IL-6 signaling. In a further embodiment, sgp130 or a fragment thereof may be a fusion protein fused with a heterologous domain such as an Fc domain, for example, a gp130-Fc fusion protein such as FE301.

[0522] In one embodiment, an anti-IL-6 antibody includes, for example, Siltuximab, Olokizumab (CDP6038), Elsilimomab, Sirukumab (CNTO136), Clazakizumab (ALD518, BMS-945429), Gerilimzumab (ARGX 109), and FM101. In another embodiment, an anti-IL-6R antibody includes, for example, Tocilizumab, Satralizumab, and Sarilumab. In one embodiment, an inhibitor of IL-6 signaling includes small molecules such as CPSI-2364.

[0523] Anti-IL-6 Receptor Antibodies

[0524] In one embodiment, the anti-IL-6 receptor antibody is an antigen-binding molecule, an antibody, an antibody derivative, or an antibody fragment that can bind to human IL-6 receptors and block IL-6 signaling.

[0525] In a preferred embodiment, the anti-IL-6 receptor antibody is an antibody, an antibody fragment, or an antibody derivative that binds to human IL-6 receptors, and comprises the heavy chain CDR1 of SEQ ID NO: 433, the heavy chain CDR2 of SEQ ID NO: 434, and the heavy chain CDR3 of SEQ ID NO: 435, and the light chain CDR1 of SEQ ID NO: 436, the light chain CDR2 of SEQ ID NO: 437, and the light chain CDR3 of SEQ ID NO: 438.

[0526] In a preferred embodiment, the anti-IL-6 receptor antibody is an antibody, an antibody fragment, or an antibody derivative that binds to human IL-6 receptors, and comprises the heavy chain variable region of SEQ ID NO: 439 and the light chain variable region of SEQ ID NO: 440. In a different preferred embodiment, the anti-IL-6 receptor antibody is an antibody, an antibody fragment, or an antibody derivative that binds to human IL-6 receptors, and comprises the heavy chain variable region of SEQ ID NO: 441 and the light chain variable region of SEQ ID NO: 442. More preferably, the anti-IL-6 receptor antibody is an IgG antibody.

[0527] Tocilizumab

[0528] Tocilizumab (INN) is a humanized immunoglobulin G1 (IgG1) kappa anti-human IL-6R monoclonal antibody. Satralizumab is a humanized, immunoglobulin G2 (IgG2) kappa anti-human IL-6R monoclonal antibody. Tocilizumab and Satralizumab block the binding of IL-6 to soluble and membrane-bound IL-6 receptors (IL-6R); therefore, they inhibit classical and trans-IL-6 signaling.

[0529] The amino acid sequence of the heavy chain of Tocilizumab (SEQ ID NO: 441) is shown below. The part shown in bold is the heavy chain variable region of Tocilizumab (SEQ ID NO: 439), and the underlined parts are the heavy chain CDR1 (SEQ ID NO: 433), the heavy chain CDR2 (SEQ ID NO: 434), and the heavy chain CDR3 (SEQ ID NO: 435), in that order.

QVQLQESGPG LVRPSQTLSL TCTVSGYSIT
SDHAWSWVRQ PPGRGLEWIG YISYSGITTY
NPSLKSRVTM LRDTSKNQFS LRLSSVTAAD
TAVYYCARSL ARTTAMDYWG QGSLVTVSSA
STKGPSVFPL APSSKSTSGG TAALGCLVKD
YFPEPVTVSW NSGALTSGVH TFPAVLQSSG
LYSLSSVVTV PSSSLGTQTY ICNVNHKPSN
TKVDKKVEPK SCDKTHTCPP CPAPELLGGP
SVFLFPPKPK DTLMISRTPE VTCVVVDVSH
EDPEVKFNWY VDGVEVHNAK TKPREEQYNS
TYRVVSVLTV LHQDWLNGKE YKCKVSNKAL
PAPIEKTISK AKGQPREPQV YTLPPSRDEL
TKNQVSLTCL VKGFYPSDIA VEWESNGQPE
NNYKTTPPVL DSDGSFFLYS KLTVDKSRWQ
QGNVFSCSVM HEALHNHYTQ KSLSLSPG

[0530] The amino acid sequence of the light chain of Tocilizumab (SEQ ID NO: 442) is shown below. The part shown in bold is the light chain variable region of Tocilizumab (SEQ ID NO: 440), and the underlined parts are the light chain CDR1 (SEQ ID NO: 436), the light chain CDR2 (SEQ ID NO: 437), and the light chain CDR3 (SEQ ID NO: 438), in that order.

DIQMTQSPSS LSASVGDRVT ITCRASQDIS
SYLNWYQQKP GKAPKLLIYY TSRLHSGVPS
RFSGSGSGTD FTFTISSLQP EDIATYYCQQ
GNTLPYTFGQ GTKVEIKRTV AAPSVFIFPP
SDEQLKSGTA SVVCLLNNFY PREAKVQWKV
DNALQSGNSQ ESVTEQDSKD STYSLSSTLT
LSKADYEKHK VYACEVTHQG LSSPVTKSFN
RGEC

[0531] In one embodiment, the amino acids contained in the amino acid sequences of the present disclosure may be subjected to post-translational modification. For example, conversion of an N-terminal glutamine residue (Q) to pyroglutamic acid (pGlu) by pyroglutamylation is a modification well-known to those skilled in the art. Even when amino acids are post-translationally modified this way, they are, of course, included in the amino acid sequences described in the present disclosure.

[0532] Pharmaceutical Compositions Comprising a Cytokine Inhibitor

[0533] From another viewpoint, the present disclosure provides pharmaceutical compositions comprising as an active ingredient a cytokine inhibitor, preferably an anti-human IL-6 receptor antibody, and more preferably Tocilizumab. Furthermore, the present disclosure relates to pharmaceutical compositions comprising the cytokine inhibitor as the active ingredient, which prevent or treat cytokine release syndrome (CRS) associated with administration of an anti-T cell antigen-binding molecule. The pharmaceutical compositions of the present disclosure are preferably administered to an individual who may develop CRS associated with administration of an anti-T cell antigen-binding molecule, and/or an individual who has developed CRS or signs of CRS and needs treatment. More specifically, the present disclosure provides methods for treating cytokine release syndrome (CRS) associated with administration of an anti-T cell antigen-binding molecule, wherein the method comprises the steps of: administering an anti-T cell antigen-binding molecule to a subject; selecting a subject who has developed signs of CRS associated with the anti-T cell antigen-binding molecule and needs treatment; and administering a cytokine inhibitor to the selected subject.

[0534] Furthermore, in the present disclosure, a pharmaceutical composition comprising a cytokine inhibitor as an active ingredient can be expressed as a method for preventing or treating CRS associated with administration of an anti-T cell antigen-binding molecule, which comprises administering the cytokine inhibitor to an individual, or use of the cytokine inhibitor in producing an agent for CRS prevention or CRS treatment.

[0535] In the present disclosure, “comprising a cytokine inhibitor as an active ingredient” means that the cytokine inhibitor is comprised as a major active ingredient, and this does not limit the content percentage of the cytokine inhibitor.

[0536] If necessary, cytokine inhibitors of the present invention may be encapsulated in microcapsules (e.g., those made of hydroxymethylcellulose, gelatin, and poly(methylmetacrylate)), or incorporated as components of a colloidal drug delivery system (e.g., liposomes, albumin microspheres, microemulsion, nanoparticles, and nanocapsules) (see, for example, “Remington's Pharmaceutical Science 16th edition”, Oslo Ed. (1980)). Methods for preparing the pharmaceutical agents as controlled-release pharmaceutical agents are also well known, and such methods may be applied to the cytokine inhibitors of the present invention (J. Biomed. Mater. Res. (1981) 15: 267-277; Chemtech. (1982) 12: 98-105; U.S. Pat. No. 3,773,719; European Patent Application Publication Nos. EP 58,481 and EP 133,988; Biopolymers (1983) 22: 547-556).

[0537] The pharmaceutical compositions comprising the cytokine inhibitor of the present disclosure may be administered to patients by oral or parenteral administration, and parenteral administration is preferred. Specific examples of the administration method include administration by injection, transnasal administration, transpulmonary administration, and transdermal administration. Examples of administration by injection include intravenous injection, intramuscular injection, intraperitoneal injection, and subcutaneous injection. A pharmaceutical composition of the present invention or a cytotoxicity-inducing agent and a cell growth-inhibiting agent can be administered systemically or locally, for example, through administration by injection. The method of administration can be selected appropriately according to the age and symptoms of the patient. The dose can be selected from the range of 0.0001 mg to 1000 mg per kilogram body weight for a single administration. Alternatively, for example, the dose may be selected from the range of 0.001 mg/body to 100000 mg/body per patient. However, the pharmaceutical compositions of the present invention are not limited to these doses.

[0538] In one embodiment, when the cytokine inhibitor is Tocilizumab, Tocilizumab is administered at approximately 4 to 12 mg/kg per dose, such as 8 mg/kg or less per dose for a patient weighing 30 kg or more and at 12 mg/kg or less per dose for a patient weighing less than 30 kg, for example by intravenous injection over a course of 0.5 hours, 1 hour, 2 hours, or 3 hours. In a different embodiment, when Tocilizumab is administered for purposes of treating CRS, and the symptoms of CRS are not improved after the first administration of Tocilizumab to a patient, administrations of Tocilizumab can be added up to three times. In one example, when Tocilizumab is sequentially administered in this manner, the interval must be 8 hours or more from the previous administration.

[0539] The pharmaceutical compositions comprising the cytokine inhibitor of the present disclosure can be formulated according to conventional methods (for example, Remington's Pharmaceutical Science, latest edition, Mark Publishing Company, Easton, U.S.A.), and may also contain pharmaceutically acceptable carriers and additives. Examples include, but are not limited to surfactants, excipients, coloring agents, perfumes, preservatives, stabilizers, buffers, suspending agents, isotonization agents, binders, disintegrants, lubricants, fluidity promoting agents, and flavoring agents; and other commonly used carriers can be suitably used. Specific examples of the carriers include light anhydrous silicic acid, lactose, crystalline cellulose, mannitol, starch, carmellose calcium, carmellose sodium, hydroxypropyl cellulose, hydroxypropyl methyl cellulose, polyvinylacetal diethylaminoacetate, polyvinylpyrrolidone, gelatin, medium chain fatty acid triglyceride, polyoxyethylene hardened castor oil 60, saccharose, carboxymethyl cellulose, corn starch, inorganic salt, and such.

[0540] In one embodiment, the present disclosure relates to pharmaceutical compositions comprising a cytokine inhibitor, preferably an IL-6 inhibitor, more preferably an IL-6 receptor antibody, and most preferably Tocilizumab, wherein the pharmaceutical composition is for use in its combination therapy with an anti-T cell antigen binding molecule. In one embodiment, the anti-T cell antigen-binding molecule is for example, a bispecific antibody, or preferably a bispecific antibody that binds to a cancer antigen and CD3. Details of the combination therapy are disclosed in “V. Combination therapies” herein.

### IV. Cytokine Release Syndrome (CRS)

[0541] In one embodiment, cytokine release syndrome (CRS) is a serious and potentially life-threatening side effect that can occur when a pharmaceutical agent, for example, an antibody pharmaceutical (such as, an anti-T cell antibody) or a T cell pharmaceutical (such as, a chimeric antigen receptor (CAR) T cell (CAR-T cell)) is administered. Administration of antibody pharmaceuticals or T cell pharmaceuticals activates the immune response in the body more than necessary and releases inflammatory cytokines and such, which result in various symptoms such as chills, nausea, malaise, headache, fever, tachycardia, and blood pressure fluctuations. Severe cases, in particular, are sometimes referred to as cytokine storms. CRS results from high levels of immune activation when large numbers of lymphocytes and/or myeloid cells release inflammatory cytokines upon activation. The severity of CRS and the timing of onset of symptoms may vary depending on the magnitude of immune cell activation, the type of pharmaceutical agent administered, and/or the amount of systemic tumor tissue in the individual. In the case of T cell therapy for cancer, symptom onset is typically days to weeks after administration of the T cell therapy, for example, when there is a peak of T cell proliferation in vivo. See, for example, Lee et al. Blood. 124.2 (2014): 188-95.

[0542] In one embodiment, the symptoms of CRS may include neurologic toxicity, disseminated intravascular coagulation, cardiac dysfunction, adult respiratory distress syndrome, renal failure, and/or hepatic failure. For example, the symptoms of CRS may include fever/high fever with or without chills, fatigue, discomfort, muscle pain, vomiting, headache, nausea, loss of appetite, joint pain, diarrhea, rash, hypoxia, tachypnea, hypotension, widened pulse pressure, potentially diminished cardiac output (late), increased cardiac output (early), azotemia, hypofibrinogenemia with or without bleeding, elevated D-dimer, hyperbilirubinemia, transaminitis, confusion, delirium, changes in mental status, hallucinations, tremor (trembling), seizures, altered gait, word finding difficulty, obvious aphasia, or dementia.

[0543] In one embodiment, CRS is characterized by increased concentrations of several cytokines in an individual. In one embodiment, the cytokines include IL-1β, IL-2, IL-4, IL-5, IL-6, IL-8, IL-10, IL-12, IL-13, IL-15, IL-17, IL-1Ra, IL-2R, IFN-α, IFN-γ, MIP-1α, MIP-1(3, MCP-1, TNFα, GM-CSF, G-CSF, CXCL9, CXCL10, CXCR factor, VEGF, RANTES, eotaxin, EGF, HGF, FGF-β, CD30, CD30L, CD40, CD40L, ferritin, and RAGE, but are not limited thereto. Preferably, the cytokine comprises IL-6, IL-1 beta, or TNF-alpha, or any combination thereof. Most preferably, the cytokine is IL-6. In one embodiment, patients with large tumor volumes have a higher incidence and severity of cytokine syndrome.

[0544] In one embodiment, those skilled in the art will understand that the term “cytokine concentration” includes a measured concentration value, magnitude of fold change, magnitude of percent (%) change, or magnitude of rate change. In addition, methods for measuring cytokines in blood, saliva, serum, urine, plasma, and/or serum are well known in the art.

[0545] Severity (Grade) of CRS

[0546] In one embodiment, CRS can be classified by severity (Grade) from 1 to 5. In one embodiment, for Grade 1 CRS, only symptomatic treatment is needed (for example, nausea, fever, fatigue, muscle pain, malaise, and headache), and the symptoms are not life threatening. For Grade 2 CRS, the symptoms require moderate intervention and generally respond to moderate intervention. Individuals with Grade 2 CRS develop hypotension that is responsive to either fluids or one type of low-dose vasopressor; or they develop grade 2 organ toxicity or mild respiratory symptoms that are responsive to low flow oxygen (less than 40% oxygen). In individuals with Grade 3 CRS, hypotension generally cannot be reversed by fluid therapy or one type of low-dose vasopressor. These individuals generally require lower flow of oxygen and have grade 3 organ toxicity (for example, renal or cardiac dysfunction or blood coagulation disorder) and/or grade 4 transaminitis. Individuals with Grade 3 CRS require more aggressive intervention, such as oxygen of 40% or higher, a high-dose vasopressor, and/or multiple vasopressors. Individuals with Grade 4 CRS suffer from immediately life-threatening symptoms, including grade 4 organ toxicity or a need for mechanical artificial ventilation. Individuals with Grade 4 CRS generally do not have transaminitis. In individuals with Grade 5 CRS, the toxicity causes death.

[0547] In one embodiment, the CRS grading is based on the Common Terminology Criteria for Adverse Events (CTCAE) v4.03 shown in Table 6, the Common Terminology Criteria for Adverse Events (CTCAE) v5.0 shown in Table 7, Lee's criteria of 2014 (Lee D W, et al. Current concepts in the diagnosis and management of cytokine release syndrome. Blood, 124 (2014), pp. 188-195) shown in Table 8, the 2019 ASTCT CRS Consensus Grading (Lee D W, et al. ASTCT Consensus Grading for Cytokine Release Syndrome and Neurologic Toxicity Associated with Immune Effector Cells. Biol Blood Marrow Transplant. 2019 April; 25(4):625-638) shown in Table 9, Penn's criteria, MSKCC's criteria, or CARTOX's criteria (Biol Blood Marrow Transplant. 2019 April; 25(4):625-638 indicated above). Preferably, CRS grading is based on CTCAE v4.03, CTCAE v5.0, or Lee's criteria of 2014. Unless otherwise specified, CRS as used herein refers to CRS according to the criteria in Table 8 (Lee's criteria of 2014).

TABLE 6
(CTCAE v 4.03)

| | |
|---|---|
| Grade I | Mild reaction; not requiring interruption of infusion; not requiring treatment |
| Grade II | Requiring interruption of treatment or infusion. However, responding quickly |
| | to symptomatic treatment (for example: antihistamines, NSAIDs, narcotic |
| | pharmaceutical agents, and intravenous infusion); requiring prophylactic |
| | medications in 24 hours or less |
| Grade III | Prolonged (for example: not rapidly responsive to symptomatic treatment |
| | and/or Drier interruption of infusion); recurrence after initial improvement; |
| | requiring hospitalization due to sequela(e) (for example: renal dysfunction, |
| | and pulmonary infiltration) |
| Grade IV | Life-threatening; requiring positive-pressure breathing or mechanical ventilation |
| Grade V | Death |

TABLE 7
(CTCAE v 5.0)

| | |
|---|---|
| Grade I | Fever with or without constitutional symptoms |
| Grade II | Hypotension responding to infusion; hypoxia responding to <40% |
| | oxygen administration |
| Grade III | Hypotension manageable by a single vasopressor; hypoxia requiring ≥40% |
| | oxygen administration |
| Grade IV | Life-threatening; requiring emergency treatment |
| Grade V | Death |

TABLE 8
(Lee's criteria)

| | |
|---|---|
| Grade I | Not life-threatening; requiring symptomatic treatments only (fever, nausea, |
| | fatigue, headache, muscle pain, discomfort) |
| Grade II | Requiring moderate intervention; hypoxia responding to >40% oxygen |
| | administration; hypotension responding to intravenous infusion or low-dose |
| | of a single vasopressor; grade 2 or higher organ toxicity |
| Grade III | Requiring aggressive intervention; hypoxia responding to ≤40% oxygen |
| | administration; hypotension responding to high-dose or multiple |
| | vasopressors; grade 3 or higher organ toxicity or grade 4 or higher |
| | transaminitis |
| Grade IV | Life-threatening; requiring mechanical artificial ventilation; grade 4 or |
| | higher organ toxicity (except transaminitis) |
| Grade V | Death |

TABLE 9
(ASTCT CRS Consensus Grading)

| | Fever | | Hypotension and/or hypoxia |
|---|---|---|---|
| Grade I | 38° C. or | and | Hypotension: none, hypoxia: none |
| | higher | | |
| Grade II | 38° C. or | and | Hypotension not requiring a vasopressor and/or |
| | higher | | hypoxia requiring a low-flow nasal cannula or blow-by |
| Grade III | 38° C. or | and | Hypotension requiring a single vasopressor |
| | higher | | (regardless of combined use of vasopressin), and/or |
| | | | hypoxia requiring high-flow nasal cannula, face mask, |
| | | | nonrebreathing mask, or Venturi mask |
| Grade IV | 38° C. or | and | Hypotension requiring multiple vasopressors |
| | higher | | (excluding vasopressin), and/or hypoxia requiring |
| | | | positive pressure (for example, CPAP, BiPAP, |
| | | | intubation, and mechanical artificial ventilation) |

[0548] In one embodiment, the symptoms of CRS develop within minutes, hours, or days after starting to administer the pharmaceutical agent, but some symptoms are delayed. Preferably, the symptoms of CRS develop within about 96 hours, about 72 hours, or about 48 hours after starting to administer the anti-T cell antigen-binding molecule, and more preferably, the symptoms develop from the day of administration of the anti-T cell antigen-binding molecule to the next day. In another embodiment, the severity of CRS symptoms correlates with peak cytokine concentrations.

[0549] Signs of CRS

[0550] In one embodiment, signs of CRS refer to CRS-like symptoms that are precursors to the above-mentioned CRS (regardless of Grade). Specific examples include, but are not limited to, fever or hypotension that initially develops after administration of the anti-T cell antigen binding molecule.

[0551] Treatment of CRS

[0552] In one embodiment, examples of treatment methods for CRS include inflammatory cytokine inhibitors, IL-6 inhibitors or IL-6 receptor (IL-6R) inhibitors (such as, Tocilizumab or Satralizumab), bazedoxifene, SGP130 blockers, vasoactive pharmaceutical agents, systemic adrenal cortex hormones (for example, corticosteroids), immunosuppressants, and mechanical artificial ventilation.

[0553] In one embodiment, the inflammatory cytokine inhibitor is an inhibitor or an antagonistic inhibitor of one or more cytokines selected from IL-1β, IL-2, IL-4, IL-5, IL-6, IL-8, IL-10, IL-12, IL-13, IL-15, IL-17, IL-1Ra, IL-2R, IFN-α, IFN-γ, MIP-1α, MIP-1β, MCP-1, TNFα, GM-CSF, G-CSF, CXCL9, CXCL10, CXCR factor, VEGF, RANTES, eotaxin, EGF, HGF, FGF-β, CD30, CD30L, CD40, CD40L, ferritin, and RAGE. Preferred cytokine inhibitors are disclosed in “III. Cytokine Inhibitors” herein.

[0554] In one embodiment, when the cytokine inhibitor used for CRS treatment is Tocilizumab, Tocilizumab is administered by intravenous injection at approximately 4 to 12 mg/kg per dose, such as 8 mg/kg or less per dose for a patient weighing 30 kg or more and at 12 mg/kg or less per dose for a patient weighing less than 30 kg, for example over a course of 0.5 hours, 1 hour, 2 hours, or 3 hours. In a different embodiment, when Tocilizumab is administered for purposes of treating CRS, and the symptoms of CRS are not improved after the first administration of Tocilizumab to a patient, administration of Tocilizumab can be added up to three times. In one example, when Tocilizumab is sequentially administered in this manner, the interval must be 8 hours or more from the previous administration.

[0555] Exemplary vasoactive pharmaceutical agents include but are not limited to angiotensin-11, endothelin-1, alpha adrenergic agonists, rostanoids, phosphodiesterase inhibitors, endothelin antagonists, circulatory agonists (for example, adrenaline, dobutamine, isoprenaline, and ephedrine), vasopressors (for example, noradrenaline, vasopressin, metaraminol, vasopressin, and methylene blue), inodilators (for example, milrinone and levosimendan), and dopamine

[0556] Exemplary vasopressors include but are not limited to norepinephrine, dopamine, phenylephrine, epinephrine, and vasopressin. In one embodiment, vasopressors include high-dose vasopressors and low-dose vasopressors. In one embodiment, a high-dose vasopressor includes one or more of the following: norepinephrine monotherapy at 20 μg/min or more, dopamine monotherapy at 10 μg/kg/min or more, phenylephrine monotherapy at 200 μg/min or more, and/or epinephrine monotherapy at 10 μg/min or more. In some embodiments, if an individual is on vasopressin, a high-dose vasopressor includes vasopressin+norepinephrine equivalent at 10 μg/min or more (where the dose of norepinephrine equivalent=[norepinephrine (μg/min)]+[dopamine (μg/kg/min)/2]+[epinephrine (μg/min)]+[phenylephrine (μg/min)/10]). In some embodiments, if the individual is on combination vasopressors (not vasopressin), a high-dose vasopressor includes norepinephrine equivalent at 20 μg/min or more (where the dose of norepinephrine equivalent=[norepinephrine (μg/min)]+[dopamine (μg/kg/min)/2]+[epinephrine (μg/min)]+[phenylephrine (μg/min)/10]. See for example, idem.

[0557] In one embodiment, a low-dose vasopressor is a vasopressor administered at a dose less than one or more of the doses listed above for high-dose vasopressors.

[0558] Exemplary corticosteroids include but are not limited to dexamethasone, hydrocortisone, and methylprednisolone. In one embodiment, a dose of 0.5 mg/kg of dexamethasone is used by oral or intravenous administration. In one embodiment, 8 to 20 mg of dexamethasone per dose, a pharmaceutically acceptable salt thereof, or a derivative thereof is used by oral or intravenous administration. It will be understood by those skilled in the art that the dose of dexamethasone is not limited to the above and may be appropriately changed depending on the condition of the individual and the severity of CRS.

[0559] An exemplary immunosuppressant includes a TNF-alpha inhibitor or an IL-1 inhibitor. In one embodiment, TNF-alpha inhibitors include anti-TNF-alpha antibodies, for example, a monoclonal antibody, such as Infliximab. In one embodiment, TNF-alpha inhibitors include soluble TNF-alpha receptors (for example, Etanercept). In embodiments, IL-1 or IL-1R inhibitors include Anakinra

### V. Combination Therapies

[0560] In one embodiment, the present disclosure relates to the combined use of an anti-T cell antigen-binding molecule and a cytokine inhibitor. In another embodiment, the present disclosure relates to a pharmaceutical composition comprising an anti-T cell antigen binding molecule, wherein the pharmaceutical composition is for use in its combination therapy with a cytokine inhibitor. In a further embodiment, the present disclosure relates to a pharmaceutical composition comprising a cytokine inhibitor, wherein the pharmaceutical composition is for use in its combination therapy with an anti-T cell antigen-binding molecule. The present disclosure relates to a method for treating cancer in an individual, comprising administering an anti-T cell antigen-binding molecule and a cytokine inhibitor.

[0561] In one embodiment, administration of a cytokine inhibitor prevents, alleviates, or treats cytokine release syndrome (CRS) associated with administration of an anti-T cell antigen-binding molecule in an individual. Therefore, the present disclosure may be rephrased as a method for preventing, alleviating, or treating development of CRS associated with administration of an anti-T cell antigen-binding molecule, which comprises administering a cytokine inhibitor. Alternatively, the present disclosure provides a method for any of the purposes selected from prevention, alleviation, and treatment of CRS associated with the administration of an anti-T cell antigen-binding molecule, or a combination thereof, wherein the method comprises administering a cytokine inhibitor.

[0562] In one embodiment, a cytokine inhibitor is administered subcutaneously or intravenously to an individual before, simultaneously with, or after administration of an anti-T cell antigen binding molecule. Preferably, a cytokine inhibitor is administered intravenously to an individual before, simultaneously with, or after administration of an anti-T cell antigen-binding molecule. Although not intended to be limiting, when a cytokine inhibitor is administered before or simultaneously with the administration of an anti-T cell antigen-binding molecule, it has the effect of preventing or alleviating development of CRS associated with administration of the anti-T cell antigen-binding molecule. In one embodiment, a cytokine inhibitor is administered 6 days, 5 days, 4 days, 3 days, 2 days, or 1 day before administration of the anti-T cell antigen-binding molecule, or on the same day as but before the administration. Alternatively, a cytokine inhibitor may be administered on the same day as and simultaneously with administration of the anti-T cell antigen-binding molecule (in the present disclosure, administration of a cytokine inhibitor before administration of the anti-T cell antigen-binding molecule, and administration of a cytokine inhibitor simultaneously with administration of the anti-T cell antigen-binding molecules are collectively referred to as “pre-administration of a cytokine inhibitor”). In one embodiment, pre-administration of a cytokine inhibitor prevents or alleviates development of CRS associated with administration of an anti-T cell antigen-binding molecule, without significantly impairing the efficacy of the anti-T cell antigen-binding molecule (for example, T cell-dependent cellular cytotoxicity (TDCC) and antitumor effect).

[0563] Furthermore, when a cytokine inhibitor is administered after administration of the anti-T cell antigen-binding molecule and before development of CRS, it has the effect of preventing or alleviating CRS that may develop thereafter. In addition, when a cytokine inhibitor is administered after administration of an anti-T cell antigen-binding molecule and after development of CRS or signs of CRS, it has the effect of treating CRS and alleviating their symptoms.

[0564] In one embodiment, the anti-T cell antigen-binding molecule used in the combination therapy is a bispecific antigen-binding molecule comprising “a domain comprising an antibody variable region having T cell receptor complex-binding activity” and “a domain comprising an antibody variable region having cancer antigen-binding activity”, and is preferably a bispecific antibody. In one embodiment, the bispecific antibody may have the structure of a single chain antibody, for example, a structure in which antibody variable regions are linked by linkers. In one embodiment, the anti-T cell antigen-binding molecule further comprises an Fc region with reduced Fcγ receptor-binding activity. Preferably, the anti-T cell antigen-binding molecule is a bispecific antibody comprising (1) a domain comprising an antibody variable region having a glypican 3-binding activity, (2) a domain comprising an antibody variable region having T cell receptor complex-binding activity, and (3) a domain comprising an Fc region with reduced Fcγ receptor-binding activity.

[0565] In one embodiment, a cytokine inhibitor used in the combination therapy is an IL-6 inhibitor, preferably an anti-IL-6 receptor antibody, and most preferably Tocilizumab. In one embodiment, when Tocilizumab is administered before or simultaneously with administration of the anti-T cell antigen binding molecule, Tocilizumab is administered to human adults and children, for example, at a dose selected from 5 mg/kg to 100 mg/kg, for example, 5 mg/kg to 90 mg/kg, 5 mg/kg to 80 mg/kg, 5 mg/kg to 70 mg/kg, 5 mg/kg to 60 mg/kg, 5 mg/kg to 50 mg/kg, 5 mg/kg to 40 mg/kg, 5 mg/kg to 30 mg/kg, 5 mg/kg to 20 mg/kg, 5 mg/kg to 15 mg/kg, and for example, 10 mg/kg to 100 mg/kg, 20 mg/kg to 100 mg/kg, 30 mg/kg to 100 mg/kg, 40 mg/kg to 100 mg/kg, 50 mg/kg to 100 mg/kg, 60 mg/kg to 100 mg/kg, 70 mg/kg to 100 mg/kg, 80 mg/kg to 100 mg/kg, 90 mg/kg to 100 mg/kg, and the like, per dose. In addition, although it is specified to avoid doubt, for example, when described as 5 mg to 100 mg/kg, any dose included between 5 mg to 100 mg/kg varying by 0.1 mg/kg, such as 5.0 mg/kg, 5.1 mg/kg, 5.2 mg/kg, 5.3 mg/kg, 5.4 mg/kg, 49.9 mg, 50 mg/kg, 50.1 mg/kg, 50.2 mg/kg, . . . 99.8 mg/kg, 99.9 mg/kg, and 100 mg/kg, is intended to be individually and specifically described herein. In one embodiment, Tocilizumab is administered before or simultaneously with administration of the anti-T cell antigen-binding molecule, at 8 mg/kg or less, 0.5 to 8 mg/kg, 1 to 8 mg/kg, 2 to 8 mg/kg, 3 to 8 mg/kg, 4 to 8 mg/kg, or preferably 4 to 8 mg/kg per dose for a patient weighing 30 kg or more. In another embodiment, Tocilizumab is administered before or simultaneously with administration of the anti-T cell antigen-binding molecule, at 12 mg/kg or less, 0.5 to 12 mg/kg, 1 to 12 mg/kg, 3 to 12 mg/kg, 5 to 12 mg/kg, 6 to 12 mg/kg, or preferably 6 to 12 mg/kg per dose for a patient weighing less than 30 kg.

[0566] The combination therapies of the present disclosure may further include administration of corticosteroids. In one embodiment, for the purpose of preventing or alleviating CRS associated with administration of the anti-T cell antigen-binding molecule, corticosteroids are orally or intravenously administered to an individual before administration of the anti-T cell antigen-binding molecule, 2 days, 1 day, or 0 days before (on the same day as) the administration of the anti-T cell antigen-binding molecule. Alternatively, the corticosteroid is orally or intravenously administered to an individual simultaneously with the administration of the anti-T cell antigen-binding molecule (these may be referred to as “pre-administration of a corticosteroid” or “pre-administration of a steroid”). Preferably, pre-administration of a corticosteroid is performed in addition to pre-administration of a cytokine inhibitor (in combination with pre-administration of a cytokine inhibitor). Although not intended to be limiting, examples of preferred corticosteroids include dexamethasone, hydrocortisone, and methylprednisolone. Preferably, the corticosteroid is dexamethasone, a pharmaceutically acceptable salt thereof, or a derivative thereof, which is administered orally or intravenously. It will be understood by those skilled in the art that the dose of dexamethasone is not limited to the above and may be appropriately changed depending on the condition of the individual, the development of CRS, and the like.

[0567] In one embodiment, the combination therapy is carried out on the same day as administration of an anti-T cell antigen-binding molecule in the following order: (1) pre-administration of a corticosteroid, (2) pre-administration of a cytokine inhibitor, and (3) administration of an anti-T cell antigen-binding molecule. In this case, for example, administration of a corticosteroid to an individual is completed 1 hour or more, 2 hours or more, 3 hours or more, 4 hours or more, or 5 hours or more, or preferably 2 hours or more before starting the administration of a cytokine inhibitor; furthermore, administration of a cytokine inhibitor to the individual is completed 1 hour or more, 2 hours or more, 3 hours or more, 4 hours or more, or 5 hours or more, or preferably 2 hours or more before starting the administration of the anti-T cell antigen-binding molecule. In another embodiment, administration is performed on the same day as administration of an anti-T cell antigen-binding molecule in the following order: (1) pre-administration of a cytokine inhibitor, (2) pre-administration of a corticosteroid, and (3) administration of an anti-T cell antigen-binding molecule. In this case, for example, administration of a cytokine inhibitor to an individual is completed 1 hour or more, 2 hours or more, 3 hours or more, 4 hours or more, or 5 hours or more, or preferably 2 hours or more before starting the administration of a corticosteroid; furthermore, administration of the corticosteroid to the individual is completed 1 hour or more, 2 hours or more, 3 hours or more, 4 hours or more, or 5 hours or more, or preferably 2 hours or more before starting the administration of the anti-T cell antigen-binding molecule.

[0568] In a different embodiment, the combination therapy of the present disclosure does not include pre-administration of corticosteroids. Although not intended to be limiting, pre-administration of a cytokine inhibitor prevents or alleviates development of CRS associated with administration of the anti-T cell antigen-binding molecule, and administration of corticosteroids for purposes of preventing or alleviating CRS becomes unnecessary.

[0569] It is naturally understood by those skilled in the art that the anti-T cell antigen-binding molecules, cytokine inhibitors, and/or other pharmaceutical agents in the present disclosure may all have a given “permissible range” for the timing of administration, the dosing interval, and the dose, respectively, and those skilled in the art can appropriately determine the permissible range. For example, performing timely increase or decrease of the dosing interval or appropriate increase or decrease of the dose of anti-T cell antigen-binding molecules, cytokine inhibitors, and/or other pharmaceutical agents at the discretion of the doctor, based on symptoms and such of the individual, is within the above “permissible range”.

[0570] Below, non-limiting specific examples of combination therapies comprising anti-T cell antigen-binding molecules and cytokine inhibitors are described.

Administration of an Anti-T Cell Antigen-Binding Molecule, Accompanied with Pre-Administration of a Cytokine Inhibitor

[0571] In one embodiment, the present disclosure provides a pharmaceutical composition comprising an anti-T cell antigen-binding molecule, which is for use in its combination therapy with a cytokine inhibitor. In a different embodiment, the present disclosure provides a pharmaceutical composition comprising a cytokine inhibitor, which is for use in its combination therapy with an anti-T cell antigen binding molecule. In a further embodiment, a cytokine inhibitor is administered to an individual before or simultaneously with administration of the anti-T cell antigen binding molecule. Although not intended to be limiting, when a cytokine inhibitor is administered before or simultaneously with administration of the anti-T cell antigen-binding molecule, it has the effect of preventing or alleviating development of CRS associated with administration of the anti-T cell antigen-binding molecule. In one embodiment, a cytokine inhibitor is administered 6 days, 5 days, 4 days, 3 days, 2 days, or 1 day before administration of the anti-T cell antigen-binding molecule, or on the same day as but before the administration of the bispecific antibody. Alternatively, a cytokine inhibitor is administered simultaneously with the anti-T cell antigen-binding molecule on the same day as administration of the anti-T cell antigen-binding molecule. In one embodiment, pre-administration of a cytokine inhibitor prevents or alleviates development of CRS associated with administration of an anti-T cell antigen-binding molecule, without significantly impairing the efficacy of the anti-T cell antigen-binding molecule (for example, T cell-dependent cellular cytotoxicity (TDCC) and antitumor effect).

[0572] In one embodiment, the combination therapy of the present disclosure comprises, in addition to pre-administration of a cytokine inhibitor, further administering the cytokine inhibitor to an individual 1 day, 2 days, 3 days, 4 days, or 5 days after administration of the anti-T cell antigen-binding molecule.

[0573] In one embodiment, the combination therapy of the present disclosure comprises, in addition to pre-administration of a cytokine inhibitor, further administering the cytokine inhibitor to an individual when CRS or signs of CRS develop after administration of the anti-T cell antigen-binding molecule. Here, the individual may be (i) one who has received a pre-administration of the cytokine inhibitor, or (ii) one who has received both a pre-administration of the cytokine inhibitor and an administration of the cytokine inhibitor after the administration of the anti-T cell antigen-binding molecule. In one embodiment, the CRS is CRS in Grade 2 or higher or Grade 3 or higher. Alternatively, the combination therapy of the present disclosure comprises the steps of administering an anti-T cell antigen-binding molecule to a subject, selecting a subject who has developed CRS or signs of CRS after administration of the anti-T cell antigen-binding molecule; and administering a cytokine inhibitor to the selected subject.

Administration of an Anti-T Cell Antigen-Binding Molecule (Repeated Administration), Accompanied with Pre-Administration of a Cytokine Inhibitor

[0574] In one embodiment, in the combination therapy of the present disclosure, (i) an anti-T cell antigen-binding molecule is administered repeatedly, and (ii) a cytokine inhibitor is administered before or simultaneously with each administration of the repeated administrations. Preferably, the anti-T cell antigen-binding molecule is administered repeatedly at the same dose.

### When Pre-Administration of a Cytokine Inhibitor is Performed for Each (Every) Anti-T Cell Antigen-Binding Molecule Administration

### (Repeated Administration of the Anti-T Cell Antigen-Binding Molecule at Intervals of Once Every Week)

[0575] In one embodiment, in the combination therapy of the present disclosure, (i) an anti-T cell antigen-binding molecule is administered repeatedly at intervals of once every week, and (ii) a cytokine inhibitor is administered before administration of the anti-T cell antigen-binding molecule, which is 6 days, 5 days, 4 days, 3 days, 2 days, or 1 day before, or on the same day as each administration of the repeated administrations. Alternatively, (i) an anti-T cell antigen-binding molecule is administered repeatedly at intervals of once every week, and (ii) a cytokine inhibitor is administered simultaneously with administration of the anti-T cell antigen-binding molecule on the same day as each administration of the repeated administrations.

[0576] In a further embodiment, in the combination therapy of the present disclosure, in addition to pre-administration of a cytokine inhibitor, the cytokine inhibitor may be further administered to an individual on the same day as, or 1 day, 2 days, 3 days, 4 days, 5 days, or 6 days after administration of the anti-T cell antigen-binding molecule. As specific examples, the cytokine inhibitor may be further administered as follows:
[0577] on the same day as administration of the anti-T cell antigen-binding molecule, when pre-administration of the cytokine inhibitor is performed 6 days before the administration of the anti-T cell antigen-binding molecule;
[0578] on the same day as or 1 day after administration of the anti-T cell antigen-binding molecule, when pre-administration of the cytokine inhibitor is performed 5 days before the administration of the anti-T cell antigen-binding molecule;
[0579] on the same day as, or 1 day or 2 days after administration of the anti-T cell antigen-binding molecule, when pre-administration of the cytokine inhibitor is performed 4 days before the administration of the anti-T cell antigen-binding molecule;
[0580] on the same day as, or 1 day, 2 days, or 3 days after administration of the anti-T cell antigen-binding molecule, when pre-administration of the cytokine inhibitor is performed 3 days before the administration of the anti-T cell antigen-binding molecule;
[0581] on the same day as, or 1 day, 2 days, 3 days, or 4 days after administration of the anti-T cell antigen-binding molecule, when pre-administration of the cytokine inhibitor is performed 2 days before the administration of the anti-T cell antigen-binding molecule;
[0582] on the same day as, or 1 day, 2 days, 3 days, 4 days, or 5 days after administration of the anti-T cell antigen-binding molecule, when pre-administration of the cytokine inhibitor is performed 1 day before the administration of the anti-T cell antigen-binding molecule; or
[0583] 1 day, 2 days, 3 days, 4 days, 5 days, or 6 days after administration of the anti-T cell antigen-binding molecule, when pre-administration of the cytokine inhibitor is performed on the same day as the administration of the anti-T cell antigen-binding molecule.

### (Repeated Administration of the Anti-T Cell Antigen-Binding Molecule at Intervals of Once Every 2 Weeks)

[0584] In one embodiment, in the combination therapy of the present disclosure, (i) an anti-T cell antigen-binding molecule is administered repeatedly at intervals of once every 2 weeks, and (ii) a cytokine inhibitor is administered before administration of the anti-T cell antigen-binding molecule, which is 6 days, 5 days, 4 days, 3 days, 2 days, or 1 day before, or on the same day as each administration of the repeated administrations. Alternatively, (i) an anti-T cell antigen-binding molecule is administered repeatedly at intervals of once every 2 weeks, and (ii) a cytokine inhibitor is administered simultaneously with administration of the anti-T cell antigen-binding molecule on the same day as each administration of the repeated administrations.

[0585] In a further embodiment, in the combination therapy of the present disclosure, in addition to pre-administration of a cytokine inhibitor, the cytokine inhibitor may be further administered to an individual on the same day as, or 1 day, 2 days, 3 days, 4 days, 5 days, or 6 days after administration of the anti-T cell antigen-binding molecule. As specific examples, the cytokine inhibitor may be further administered as follows:
[0586] on the same day as, or 1 day, 2 days, 3 days, 4 days, 5 days, or 6 days after administration of the anti-T cell antigen-binding molecule (when pre-administration of the cytokine inhibitor is performed 6 days, 5 days, 4 days, 3 days, 2 days, or 1 day before the administration of the anti-T cell antigen-binding molecule); or
[0587] 1 day, 2 days, 3 days, 4 days, 5 days, or 6 days after administration of the anti-T cell antigen-binding molecule (when pre-administration of the cytokine inhibitor is performed on the same day as the administration of the anti-T cell antigen-binding molecule).

### (Repeated Administration of the Anti-T Cell Antigen-Binding Molecule at Intervals of Once Every 3 Weeks)

[0588] In one embodiment, in the combination therapy of the present disclosure, (i) an anti-T cell antigen-binding molecule is administered repeatedly at intervals of once every 3 weeks, and (ii) a cytokine inhibitor is administered before administration of the anti-T cell antigen-binding molecule, which is 6 days, 5 days, 4 days, 3 days, 2 days, or 1 day before, or on the same day as each administration of the repeated administrations. Alternatively, (i) an anti-T cell antigen-binding molecule is administered repeatedly at intervals of once every 3 weeks, and (ii) a cytokine inhibitor is administered simultaneously with administration of the anti-T cell antigen-binding molecule on the same day as each administration of the repeated administrations.

[0589] In a further embodiment, in the combination therapy of the present disclosure, in addition to pre-administration of a cytokine inhibitor, the cytokine inhibitor may be further administered to an individual on the same day as, or 1 day, 2 days, 3 days, 4 days, 5 days, or 6 days after administration of the anti-T cell antigen-binding molecule. As specific examples, the cytokine inhibitor may be further administered as follows:
[0590] on the same day as, or 1 day, 2 days, 3 days, 4 days, 5 days, or 6 days after administration of the anti-T cell antigen-binding molecule (when pre-administration of the cytokine inhibitor is performed 6 days, 5 days, 4 days, 3 days, 2 days, or 1 day before the administration of the anti-T cell antigen-binding molecule); or
[0591] 1 day, 2 days, 3 days, 4 days, 5 days, or 6 days after administration of the anti-T cell antigen-binding molecule (when pre-administration of the cytokine inhibitor is performed on the same day as the administration of the anti-T cell antigen-binding molecule).

### (Repeated Administration of the Anti-T Cell Antigen-Binding Molecule at Intervals of Once Every 4 Weeks)

[0592] In one embodiment, in the combination therapy of the present disclosure, (i) an anti-T cell antigen-binding molecule is administered repeatedly at intervals of once every 4 weeks, and (ii) a cytokine inhibitor is administered before administration of the anti-T cell antigen-binding molecule, which is 6 days, 5 days, 4 days, 3 days, 2 days, or 1 day before, or on the same day as each administration of the repeated administrations. Alternatively, (i) an anti-T cell antigen-binding molecule is administered repeatedly at intervals of once every 4 weeks, and (ii) a cytokine inhibitor is administered simultaneously with administration of the anti-T cell antigen-binding molecule on the same day as each administration of the repeated administrations.

[0593] In a further embodiment, in the combination therapy of the present disclosure, in addition to pre-administration of a cytokine inhibitor, the cytokine inhibitor may be further administered to an individual on the same day as, or 1 day, 2 days, 3 days, 4 days, 5 days, or 6 days after administration of the anti-T cell antigen-binding molecule. As specific examples, the cytokine inhibitor may be further administered as follows:
[0594] on the same day as, or 1 day, 2 days, 3 days, 4 days, 5 days, or 6 days after administration of the anti-T cell antigen-binding molecule (when pre-administration of the cytokine inhibitor is performed 6 days, 5 days, 4 days, 3 days, 2 days, or 1 day before the administration of the anti-T cell antigen-binding molecule); or
[0595] 1 day, 2 days, 3 days, 4 days, 5 days, or 6 days after administration of the anti-T cell antigen-binding molecule (when pre-administration of the cytokine inhibitor is performed on the same day as the administration of the anti-T cell antigen-binding molecule).

### (Repeated Administration of the Anti-T Cell Antigen-Binding Molecule at Intervals of Once Every 5 Weeks)

[0596] In one embodiment, in the combination therapy of the present disclosure, (i) an anti-T cell antigen-binding molecule is administered repeatedly at intervals of once every 5 weeks, and (ii) a cytokine inhibitor is administered before administration of the anti-T cell antigen-binding molecule, which is 6 days, 5 days, 4 days, 3 days, 2 days, or 1 day before, or on the same day as each administration of the repeated administrations. Alternatively, (i) an anti-T cell antigen-binding molecule is administered repeatedly at intervals of once every 5 weeks, and (ii) a cytokine inhibitor is administered simultaneously with administration of the anti-T cell antigen-binding molecule on the same day as each administration of the repeated administrations.

[0597] In a further embodiment, in the combination therapy of the present disclosure, in addition to pre-administration of a cytokine inhibitor, the cytokine inhibitor may be further administered to an individual on the same day as, or 1 day, 2 days, 3 days, 4 days, 5 days, or 6 days after administration of the anti-T cell antigen-binding molecule. As specific examples, the cytokine inhibitor may be further administered as follows:
[0598] on the same day as, or 1 day, 2 days, 3 days, 4 days, 5 days, or 6 days after administration of the anti-T cell antigen-binding molecule (when pre-administration of the cytokine inhibitor is performed 6 days, 5 days, 4 days, 3 days, 2 days, or 1 day before the administration of the anti-T cell antigen-binding molecule); or
[0599] 1 day, 2 days, 3 days, 4 days, 5 days, or 6 days after administration of the anti-T cell antigen-binding molecule (when pre-administration of the cytokine inhibitor is performed on the same day as the administration of the anti-T cell antigen-binding molecule).

### When Pre-Administration of a Cytokine Inhibitor is Performed for the First or Multiple Administrations of an Anti-T Cell Antigen-Binding Molecule

### (Repeated Administration of the Anti-T Cell Antigen-Binding Molecule at Intervals of Once Every Week)

[0600] In one embodiment, in the combination therapy of the present disclosure, an anti-T cell antigen-binding molecule is administered repeatedly at intervals of once every week, and pre-administration of a cytokine inhibitor is performed for the first or multiple administrations of the repeated administrations. Specifically, for example, an anti-T cell antigen-binding molecule is administered repeatedly at intervals of once every week, and pre-administration of a cytokine inhibitor is performed according to the following embodiment:
[0601] the cytokine inhibitor is administered before administration of the anti-T cell antigen-binding molecule, which is 6 days before the first administration or each administration of the first to second, the first to third, the first to fourth, or the first to fifth administrations of the repeated administrations;
[0602] the cytokine inhibitor is administered before administration of the anti-T cell antigen-binding molecule, which is 5 days before the first administration or each administration of the first to second, the first to third, the first to fourth, or the first to fifth administrations of the repeated administrations;
[0603] the cytokine inhibitor is administered before administration of the anti-T cell antigen-binding molecule, which is 4 days before the first administration or each administration of the first to second, the first to third, the first to fourth, or the first to fifth administrations of the repeated administrations;
[0604] the cytokine inhibitor is administered before administration of the anti-T cell antigen-binding molecule, which is 3 days before the first administration or each administration of the first to second, the first to third, the first to fourth, or the first to fifth administrations of the repeated administrations;
[0605] the cytokine inhibitor is administered before administration of the anti-T cell antigen-binding molecule, which is 2 days before the first administration or each administration of the first to second, the first to third, the first to fourth, or the first to fifth administrations of the repeated administrations;
[0606] the cytokine inhibitor is administered before administration of the anti-T cell antigen-binding molecule, which is 1 day before the first administration or each administration of the first to second, the first to third, the first to fourth, or the first to fifth administrations of the repeated administrations;
[0607] the cytokine inhibitor is administered before administration of the anti-T cell antigen-binding molecule, on the same day as the first administration or each administration of the first to second, the first to third, the first to fourth, or the first to fifth administrations of the repeated administrations; or
[0608] the cytokine inhibitor is administered simultaneously with administration of the anti-T cell antigen-binding molecule, on the same day as the first administration or each administration of the first to second, the first to third, the first to fourth, or the first to fifth administrations of the repeated administrations.

[0609] In a further embodiment, in the combination therapy of the present disclosure, in addition to pre-administration of a cytokine inhibitor according to the above embodiment, the cytokine inhibitor may be further administered to an individual on the same day as, or 1 day, 2 days, 3 days, 4 days, 5 days, or 6 days after administration of the anti-T cell antigen-binding molecule. Specifically, the cytokine inhibitor may be further administered as follows:
[0610] on the same day as the first administration or each administration of the first to second, the first to third, the first to fourth, or the first to fifth administrations of the anti-T cell antigen-binding molecule (when pre-administration of the cytokine inhibitor is performed 6 days before the said first administration or each administration of the first to second, the first to third, the first to fourth, or the first to fifth administrations of the anti-T cell antigen-binding molecule, respectively);
[0611] on the same day as or 1 day after the first administration or each administration of the first to second, the first to third, the first to fourth, or the first to fifth administrations of the anti-T cell antigen-binding molecule (when pre-administration of the cytokine inhibitor is performed 5 days before the said first administration or each administration of the first to second, the first to third, the first to fourth, or the first to fifth administrations of the anti-T cell antigen-binding molecule, respectively);
[0612] on the same day as, or 1 day or 2 days after the first administration or each administration of the first to second, the first to third, the first to fourth, or the first to fifth administrations of the anti-T cell antigen-binding molecule (when pre-administration of the cytokine inhibitor is performed 4 days before the said first administration or each administration of the first to second, the first to third, the first to fourth, or the first to fifth administrations of the anti-T cell antigen-binding molecule, respectively);
[0613] on the same day as, or 1 day, 2 days, or 3 days after the first administration or each administration of the first to second, the first to third, the first to fourth, or the first to fifth administrations of the anti-T cell antigen-binding molecule (when pre-administration of the cytokine inhibitor is performed 3 days before the said first administration or each administration of the first to second, the first to third, the first to fourth, or the first to fifth administrations of the anti-T cell antigen-binding molecule, respectively);
[0614] on the same day as, or 1 day, 2 days, 3 days, or 4 days after the first administration or each administration of the first to second, the first to third, the first to fourth, or the first to fifth administrations of the anti-T cell antigen-binding molecule (when pre-administration of the cytokine inhibitor is performed 2 days before the said first administration or each administration of the first to second, the first to third, the first to fourth, or the first to fifth administrations of the anti-T cell antigen-binding molecule, respectively);
[0615] on the same day as, or 1 day, 2 days, 3 days, 4 days, or 5 days after the first administration or each administration of the first to second, the first to third, the first to fourth, or the first to fifth administrations of the anti-T cell antigen-binding molecule (when pre-administration of the cytokine inhibitor is performed 1 day before the said first administration or each administration of the first to second, the first to third, the first to fourth, or the first to fifth administrations of the anti-T cell antigen-binding molecule, respectively); or
[0616] 1 day, 2 days, 3 days, 4 days, 5 days, or 6 days after the first administration or each administration of the first to second, the first to third, the first to fourth, or the first to fifth administrations of the anti-T cell antigen-binding molecule (when pre-administration of the cytokine inhibitor is performed on the same day as the said first administration or each administration of the first to second, the first to third, the first to fourth, or the first to fifth administrations of the anti-T cell antigen-binding molecule, respectively).

### (Repeated Administration of the Anti-T Cell Antigen-Binding Molecule at Intervals of Once Every 2 Weeks)

[0617] In one embodiment, in the combination therapy of the present disclosure, an anti-T cell antigen-binding molecule is administered repeatedly at intervals of once every 2 weeks, and pre-administration of a cytokine inhibitor is performed for the first or multiple administrations of the repeated administrations. Specifically, an anti-T cell antigen-binding molecule is administered repeatedly at intervals of once every 2 weeks, and pre-administration of a cytokine inhibitor is performed according to the following embodiment:
[0618] the cytokine inhibitor is administered before administration of the anti-T cell antigen-binding molecule, which is 6 days before the first administration or each administration of the first to second, the first to third, the first to fourth, or the first to fifth administrations of the repeated administrations;
[0619] the cytokine inhibitor is administered before administration of the anti-T cell antigen-binding molecule, which is 5 days before the first administration or each administration of the first to second, the first to third, the first to fourth, or the first to fifth administrations of the repeated administrations;
[0620] the cytokine inhibitor is administered before administration of the anti-T cell antigen-binding molecule, which is 4 days before the first administration or each administration of the first to second, the first to third, the first to fourth, or the first to fifth administrations of the repeated administrations;
[0621] the cytokine inhibitor is administered before administration of the anti-T cell antigen-binding molecule, which is 3 days before the first administration or each administration of the first to second, the first to third, the first to fourth, or the first to fifth administrations of the repeated administrations;
[0622] the cytokine inhibitor is administered before administration of the anti-T cell antigen-binding molecule, which is 2 days before the first administration or each administration of the first to second, the first to third, the first to fourth, or the first to fifth administrations of the repeated administrations;
[0623] the cytokine inhibitor is administered before administration of the anti-T cell antigen-binding molecule, which is 1 day before the first administration or each administration of the first to second, the first to third, the first to fourth, or the first to fifth administrations of the repeated administrations;
[0624] the cytokine inhibitor is administered before administration of the anti-T cell antigen-binding molecule, on the same day as the first administration or each administration of the first to second, the first to third, the first to fourth, or the first to fifth administrations of the repeated administrations; or
[0625] the cytokine inhibitor is administered simultaneously with administration of the anti-T cell antigen-binding molecule, on the same day as the first administration or each of the first to second, the first to third, the first to fourth, or the first to fifth administrations of the repeated administrations.

[0626] In a further embodiment, in the combination therapy of the present disclosure, in addition to pre-administration of a cytokine inhibitor according to the above embodiment, the cytokine inhibitor may be further administered to an individual on the same day as, or 1 day, 2 days, 3 days, 4 days, 5 days, or 6 days after administration of the anti-T cell antigen-binding molecule. Specifically, the cytokine inhibitor may be further administered as follows:
[0627] on the same day as, or 1 day, 2 days, 3 days, 4 days, 5 days, or 6 days after the first administration or each administration of the first to second, the first to third, the first to fourth, or the first to fifth administrations of the anti-T cell antigen-binding molecule (when pre-administration of the cytokine inhibitor is performed 6 days, 5 days, 4 days, 3 days, 2 days, or 1 day before the said first administration or each of the first to second, the first to third, the first to fourth, or the first to fifth administrations of the anti-T cell antigen-binding molecule); or
[0628] 1 day, 2 days, 3 days, 4 days, 5 days, or 6 days after the first administration or each administration of the first to second, the first to third, the first to fourth, or the first to fifth administrations of the anti-T cell antigen-binding molecule (when pre-administration of the cytokine inhibitor is performed on the same day as the said first administration or each administration of the first to second, the first to third, the first to fourth, or the first to fifth administrations of the anti-T cell antigen-binding molecule).

### (Repeated Administration of the Anti-T Cell Antigen-Binding Molecule at Intervals of Once Every 3 Weeks)

[0629] In one embodiment, in the combination therapy of the present disclosure, an anti-T cell antigen-binding molecule is administered repeatedly at intervals of once every 3 weeks, and pre-administration of a cytokine inhibitor is performed for the first or multiple administrations of the repeated administrations. Specifically, an anti-T cell antigen-binding molecule is administered repeatedly at intervals of once every 3 weeks, and pre-administration of a cytokine inhibitor is performed according to the following embodiment:
[0630] the cytokine inhibitor is administered before administration of the anti-T cell antigen-binding molecule, which is 6 days before the first administration- or each administration of the first to second, the first to third, the first to fourth, or the first to fifth administrations of the repeated administrations;
[0631] the cytokine inhibitor is administered before administration of the anti-T cell antigen-binding molecule, which is 5 days before the first administration or each administration of the first to second, the first to third, the first to fourth, or the first to fifth administrations of the repeated administrations;
[0632] the cytokine inhibitor is administered before administration of the anti-T cell antigen-binding molecule, which is 4 days before the first administration or each administration of the first to second, the first to third, the first to fourth, or the first to fifth administrations of the repeated administrations;
[0633] the cytokine inhibitor is administered before administration of the anti-T cell antigen-binding molecule, which is 3 days before the first administration or each administration of the first to second, the first to third, the first to fourth, or the first to fifth administrations of the repeated administrations;
[0634] the cytokine inhibitor is administered before administration of the anti-T cell antigen-binding molecule, which is 2 days before the first administration or each administration of the first to second, the first to third, the first to fourth, or the first to fifth administrations of the repeated administrations;
[0635] the cytokine inhibitor is administered before administration of the anti-T cell antigen-binding molecule, which is 1 day before the first administration or each administration of the first to second, the first to third, the first to fourth, or the first to fifth administrations of the repeated administrations;
[0636] the cytokine inhibitor is administered before administration of the anti-T cell antigen-binding molecule, on the same day as the first administration or each administration of the first to second, the first to third, the first to fourth, or the first to fifth administrations of the repeated administrations; or
[0637] the cytokine inhibitor is administered simultaneously with administration of the anti-T cell antigen-binding molecule, on the same day as the first administration or each administration of the first to second, the first to third, the first to fourth, or the first to fifth administrations of the repeated administrations.

[0638] In a further embodiment, in the combination therapy of the present disclosure, in addition to pre-administration of a cytokine inhibitor according to the above embodiment, the cytokine inhibitor may be further administered to an individual on the same day as, or 1 day, 2 days, 3 days, 4 days, 5 days, or 6 days after the administration of the anti-T cell antigen-binding molecule. Specifically, the cytokine inhibitor may be further administered as follows:
[0639] on the same day as, or 1 day, 2 days, 3 days, 4 days, 5 days, or 6 days after the first administration or each administration of the first to second, the first to third, the first to fourth, or the first to fifth administrations of the anti-T cell antigen-binding molecule (when pre-administration of the cytokine inhibitor is performed 6 days, 5 days, 4 days, 3 days, 2 days, or 1 day before the said first administration or each administration of the first to second, the first to third, the first to fourth, or the first to fifth administrations of the anti-T cell antigen-binding molecule); or
[0640] 1 day, 2 days, 3 days, 4 days, 5 days, or 6 days after the first administration or each administration of the first to second, the first to third, the first to fourth, or the first to fifth administrations of the anti-T cell antigen-binding molecule (when pre-administration of the cytokine inhibitor is performed on the same day as the said first administration or each administration of the first to second, the first to third, the first to fourth, or the first to fifth administrations of the anti-T cell antigen-binding molecule).

### (Repeated Administration of the Anti-T Cell Antigen-Binding Molecule at Intervals of Once Every 4 Weeks)

[0641] In one embodiment, in the combination therapy of the present disclosure, an anti-T cell antigen-binding molecule is administered repeatedly at intervals of once every 4 weeks, and pre-administration of a cytokine inhibitor is performed for the first or multiple administrations of the repeated administrations. Specifically, an anti-T cell antigen-binding molecule is administered repeatedly at intervals of once every 4 weeks, and pre-administration of a cytokine inhibitor is performed according to the following embodiment:
[0642] the cytokine inhibitor is administered before administration of the anti-T cell antigen-binding molecule, which is 6 days before the first administration or each administration of the first to second, the first to third, the first to fourth, or the first to fifth administrations of the repeated administrations;
[0643] the cytokine inhibitor is administered before administration of the anti-T cell antigen-binding molecule, which is 5 days before the first administration or each administration of the first to second, the first to third, the first to fourth, or the first to fifth administrations of the repeated administrations;
[0644] the cytokine inhibitor is administered before administration of the anti-T cell antigen-binding molecule, which is 4 days before the first administration or each administration of the first to second, the first to third, the first to fourth, or the first to fifth administrations of the repeated administrations;
[0645] the cytokine inhibitor is administered before administration of the anti-T cell antigen-binding molecule, which is 3 days before the first administration or each administration of the first to second, the first to third, the first to fourth, or the first to fifth administrations of the repeated administrations;
[0646] the cytokine inhibitor is administered before administration of the anti-T cell antigen-binding molecule, which is 2 days before the first administration or each administration of the first to second, the first to third, the first to fourth, or the first to fifth administrations of the repeated administrations;
[0647] the cytokine inhibitor is administered before administration of the anti-T cell antigen-binding molecule, which is 1 day before the first administration or each administration of the first to second, the first to third, the first to fourth, or the first to fifth administrations of the repeated administrations;
[0648] the cytokine inhibitor is administered before administration of the anti-T cell antigen-binding molecule, on the same day as the first administration or each administration of the first to second, the first to third, the first to fourth, or the first to fifth administrations of the repeated administrations; or
[0649] the cytokine inhibitor is administered simultaneously with administration of the anti-T cell antigen-binding molecule, on the same day as the first administration or each administration of the first to second, the first to third, the first to fourth, or the first to fifth administrations of the repeated administrations.

[0650] In a further embodiment, in the combination therapy of the present disclosure, in addition to pre-administration of a cytokine inhibitor according to the above embodiment, the cytokine inhibitor may be further administered to an individual on the same day as, or 1 day, 2 days, 3 days, 4 days, 5 days, or 6 days after the administration of the anti-T cell antigen-binding molecule. Specifically, the cytokine inhibitor may be further administered as follows:
[0651] on the same day as, or 1 day, 2 days, 3 days, 4 days, 5 days, or 6 days after the first administration or each administration of the first to second, the first to third, the first to fourth, or the first to fifth administrations of the anti-T cell antigen-binding molecule (when pre-administration of the cytokine inhibitor is performed 6 days, 5 days, 4 days, 3 days, 2 days, or 1 day before the said first administration or each administration of the first to second, the first to third, the first to fourth, or the first to fifth administrations of the anti-T cell antigen-binding molecule); or
[0652] 1 day, 2 days, 3 days, 4 days, 5 days, or 6 days after the first administration or each administration of the first to second, the first to third, the first to fourth, or the first to fifth administrations of the anti-T cell antigen-binding molecule (when pre-administration of the cytokine inhibitor is performed on the same day as the said first administration or each of the first to second, the first to third, the first to fourth, or the first to fifth administrations of the anti-T cell antigen-binding molecule).

### (Repeated Administration of the Anti-T Cell Antigen-Binding Molecule at Intervals of Once Every 5 Weeks)

[0653] In one embodiment, in the combination therapy of the present disclosure, an anti-T cell antigen-binding molecule is administered repeatedly at intervals of once every 5 weeks, and pre-administration of a cytokine inhibitor is performed for the first or multiple administrations of the repeated administrations. Specifically, an anti-T cell antigen-binding molecule is administered repeatedly at intervals of once every 5 weeks, and pre-administration of a cytokine inhibitor is performed according to the following embodiment:
[0654] the cytokine inhibitor is administered before administration of the anti-T cell antigen-binding molecule, which is 6 days before the first administration or each administration of the first to second, the first to third, the first to fourth, or the first to fifth administrations of the repeated administrations;
[0655] the cytokine inhibitor is administered before administration of the anti-T cell antigen-binding molecule, which is 5 days before the first administration or each administration of the first to second, the first to third, the first to fourth, or the first to fifth administrations of the repeated administrations;
[0656] the cytokine inhibitor is administered before administration of the anti-T cell antigen-binding molecule, which is 4 days before the first administration or each administration of the first to second, the first to third, the first to fourth, or the first to fifth administrations of the repeated administrations;
[0657] the cytokine inhibitor is administered before administration of the anti-T cell antigen-binding molecule, which is 3 days before the first administration or each administration of the first to second, the first to third, the first to fourth, or the first to fifth administrations of the repeated administrations;
[0658] the cytokine inhibitor is administered before administration of the anti-T cell antigen-binding molecule, which is 2 days before the first administration or each administration of the first to second, the first to third, the first to fourth, or the first to fifth administrations of the repeated administrations;
[0659] the cytokine inhibitor is administered before administration of the anti-T cell antigen-binding molecule, which is 1 day before the first administration or each administration of the first to second, the first to third, the first to fourth, or the first to fifth administrations of the repeated administrations;
[0660] the cytokine inhibitor is administered before administration of the anti-T cell antigen-binding molecule, on the same day as the first administration or each administration of the first to second, the first to third, the first to fourth, or the first to fifth administrations of the repeated administrations; or
[0661] the cytokine inhibitor is administered simultaneously with administration of the anti-T cell antigen-binding molecule, on the same day as the first administration or each administration of the first to second, the first to third, the first to fourth, or the first to fifth administrations of the repeated administrations.

[0662] In a further embodiment, in the combination therapy of the present disclosure, in addition to pre-administration of a cytokine inhibitor according to the above embodiment, the cytokine inhibitor may be further administered to an individual on the same day as, or 1 day, 2 days, 3 days, 4 days, 5 days, or 6 days after the administration of the anti-T cell antigen-binding molecule. Specifically, the cytokine inhibitor may be further administered as follows:
[0663] on the same day as, or 1 day, 2 days, 3 days, 4 days, 5 days, or 6 days after the first administration or each administration of the first to second, the first to third, the first to fourth, or the first to fifth administrations of the anti-T cell antigen-binding molecule (when pre-administration of the cytokine inhibitor is performed 6 days, 5 days, 4 days, 3 days, 2 days, or 1 day before the said first administration or each administration of the first to second, the first to third, the first to fourth, or the first to fifth administrations of the anti-T cell antigen-binding molecule); or
[0664] 1 day, 2 days, 3 days, 4 days, 5 days, or 6 days after the first administration or each administration of the first to second, the first to third, the first to fourth, or the first to fifth administrations of the anti-T cell antigen-binding molecule (when pre-administration of the cytokine inhibitor is performed on the same day as the said first administration or each administration of the first to second, the first to third, the first to fourth, or the first to fifth administrations of the anti-T cell antigen-binding molecule).

### When Pre-Administration of a Cytokine Inhibitor is Performed in Every Dosing Cycle of an Anti-T Cell Antigen-Binding Molecule

### (Repeated Administration of the Anti-T Cell Antigen-Binding Molecule at Intervals of Once Every Week)

[0665] In one embodiment, in the combination therapy of the present disclosure, (i) an anti-T cell antigen-binding molecule is administered repeatedly in dosing cycles where 2, 3, 4, or 5 administrations constitute one cycle, (ii) intervals of repeated administrations of the anti-T cell antigen-binding molecule are once every week, and (iii) pre-administration of a cytokine inhibitor is performed for the first administration of the anti-T cell antigen-binding molecule in each of the dosing cycles. As specific examples, (i) an anti-T cell antigen-binding molecule is administered repeatedly in dosing cycles where 2, 3, 4, or 5 administrations constitute one cycle, (ii) intervals of repeated administrations of the anti-T cell antigen-binding molecule are once every week, and (iii) pre-administration of a cytokine inhibitor is performed according to the following embodiment:
[0666] the cytokine inhibitor is administered before administration of the anti-T cell antigen-binding molecule, which is 6 days before the first administration in each of the dosing cycles;
[0667] the cytokine inhibitor is administered before administration of the anti-T cell antigen-binding molecule, which is 5 days before the first administration in each of the dosing cycles;
[0668] the cytokine inhibitor is administered before administration of the anti-T cell antigen-binding molecule, which is 4 days before the first administration in each of the dosing cycles;
[0669] the cytokine inhibitor is administered before administration of the anti-T cell antigen-binding molecule, which is 3 days before the first administration in each of the dosing cycles;
[0670] the cytokine inhibitor is administered before administration of the anti-T cell antigen-binding molecule, which is 2 days before the first administration in each of the dosing cycles;
[0671] the cytokine inhibitor is administered before administration of the anti-T cell antigen-binding molecule, which is 1 day before the first administration in each of the dosing cycles;
[0672] the cytokine inhibitor is administered before administration of the anti-T cell antigen-binding molecule, on the same day as the first administration in each of the dosing cycles; or
[0673] the cytokine inhibitor is administered simultaneously with administration of the anti-T cell antigen-binding molecule, on the same day as the first administration in each of the dosing cycles.

[0674] In a further embodiment, in the combination therapy of the present disclosure, in addition to pre-administration of a cytokine inhibitor according to the above embodiment, the cytokine inhibitor may be further administered to an individual on the same day as, or 1 day, 2 days, 3 days, 4 days, 5 days, or 6 days after administration of the anti-T cell antigen-binding molecule. As specific examples, the cytokine inhibitor may be further administered as follows:
[0675] on the same day as, or 1 day, 2 days, 3 days, 4 days, 5 days, or 6 days after the first administration of the anti-T cell antigen-binding molecule in each of the dosing cycles (when the anti-T cell antigen-binding molecule is administered repeatedly in dosing cycles where 2, 3, 4, or 5 administrations constitute one cycle, and pre-administration of the cytokine inhibitor is performed 6 days, 5 days, 4 days, 3 days, 2 days, or 1 day before the said first administration of the anti-T cell antigen-binding molecule in each of the dosing cycles); or
[0676] 1 day, 2 days, 3 days, 4 days, 5 days, or 6 days after the first administration of the anti-T cell antigen-binding molecule in each of the dosing cycles (when the anti-T cell antigen-binding molecule is administered repeatedly in dosing cycles where 2, 3, 4, or 5 administrations constitute one cycle, and pre-administration of the cytokine inhibitor is performed on the same day as the said first administration of the anti-T cell antigen-binding molecule in each of the dosing cycles).

[0677] In another embodiment, in the combination therapy of the present disclosure, (i) an anti-T cell antigen-binding molecule is administered repeatedly in dosing cycles where 2, 3, 4, or 5 administrations constitute one cycle, (ii) intervals of repeated administrations of the anti-T cell antigen-binding molecule are once every week, and (iii) pre-administration of a cytokine inhibitor is performed (a) for each (every) administration of the anti-T cell antigen-binding molecule in the first dosing cycle, and (b) for the first administration in each of the second and subsequent dosing cycles. As specific examples, (i) an anti-T cell antigen-binding molecule is administered repeatedly in dosing cycles where 2, 3, 4, or 5 administrations constitute one cycle, (ii) intervals of repeated administrations of the anti-T cell antigen-binding molecule are once every week, and (iii) pre-administration of a cytokine inhibitor is performed according to the following embodiment:
[0678] the cytokine inhibitor is administered before administration of the anti-T cell antigen-binding molecule, which is (a) 6 days before each (every) administration of the anti-T cell antigen-binding molecule in the first dosing cycle, and (b) 6 days before the first administration in each of the second and subsequent dosing cycles;
[0679] the cytokine inhibitor is administered before administration of the anti-T cell antigen-binding molecule, which is (a) 5 days before each (every) administration of the anti-T cell antigen-binding molecule in the first dosing cycle, and (b) 5 days before the first administration in each of the second and subsequent dosing cycles;
[0680] the cytokine inhibitor is administered before administration of the anti-T cell antigen-binding molecule, which is (a) 4 days before each (every) administration of the anti-T cell antigen-binding molecule in the first dosing cycle, and (b) 4 days before the first administration in each of the second and subsequent dosing cycles;
[0681] the cytokine inhibitor is administered before administration of the anti-T cell antigen-binding molecule, which is (a) 3 days before each (every) administration of the anti-T cell antigen-binding molecule in the first dosing cycle, and (b) 3 days before the first administration in each of the second and subsequent dosing cycles;
[0682] the cytokine inhibitor is administered before administration of the anti-T cell antigen-binding molecule, which is (a) 2 days before each (every) administration of the anti-T cell antigen-binding molecule in the first dosing cycle, and (b) 2 days before the first administration in each of the second and subsequent dosing cycles;
[0683] the cytokine inhibitor is administered before administration of the anti-T cell antigen-binding molecule, which is (a) 1 day before each (every) administration of the anti-T cell antigen-binding molecule in the first dosing cycle, and (b) 1 day before the first administration in each of the second and subsequent dosing cycles;
[0684] the cytokine inhibitor is administered before administration of the anti-T cell antigen-binding molecule (a) on the same day as each (every) administration of the anti-T cell antigen-binding molecule in the first dosing cycle, and (b) on the same day as the first administration in each of the second and subsequent dosing cycles; or
[0685] the cytokine inhibitor is administered simultaneously with administration of the anti-T cell antigen-binding molecule (a) on the same day as each (every) administration of the anti-T cell antigen-binding molecule in the first dosing cycle, and (b) on the same day as the first administration in each of the second and subsequent dosing cycles.

[0686] In a further embodiment, in the combination therapy of the present disclosure, in addition to pre-administration of a cytokine inhibitor according to the above embodiment, the cytokine inhibitor may be further administered to an individual on the same day as, or 1 day, 2 days, 3 days, 4 days, 5 days, or 6 days after administration of the anti-T cell antigen-binding molecule. As specific examples, the cytokine inhibitor may be further administered as follows:
[0687] (a) on the same day as each (every) administration of the anti-T cell antigen-binding molecule in the first dosing cycle, and (b) on the same day as the first administration in each of the second and subsequent dosing cycles (when the anti-T cell antigen-binding molecule is administered repeatedly in dosing cycles where 2, 3, 4, or 5 administrations constitute one cycle, and pre-administration of the cytokine inhibitor is performed (a) 6 days before said each (every) administration of the anti-T cell antigen-binding molecule in the first dosing cycle, and (b) 6 days before the said first administration in each of the second and subsequent dosing cycles);
[0688] (a) on the same day as or 1 day after each (every) administration of the anti-T cell antigen-binding molecule in the first dosing cycle, and (b) on the same day as or 1 day after the first administration in each of the second and subsequent dosing cycles (when the anti-T cell antigen-binding molecule is administered repeatedly in dosing cycles where 2, 3, 4, or 5 administrations constitute one cycle, and pre-administration of the cytokine inhibitor is performed (a) 5 days before said each (every) administration of the anti-T cell antigen-binding molecule in the first dosing cycle, and (b) 5 days before the said first administration in each of the second and subsequent dosing cycles);
[0689] (a) on the same day as, or 1 day or 2 days after each (every) administration of the anti-T cell antigen-binding molecule in the first dosing cycle, and (b) on the same day as, or 1 day or 2 days after the first administration in each of the second and subsequent dosing cycles (when the anti-T cell antigen-binding molecule is administered repeatedly in dosing cycles where 2, 3, 4, or 5 administrations constitute one cycle, and pre-administration of the cytokine inhibitor is performed (a) 4 days before said each (every) administration of the anti-T cell antigen-binding molecule in the first dosing cycle, and (b) 4 days before the said first administration in each of the second and subsequent dosing cycles);
[0690] (a) on the same day as, or 1 day, 2 days, or 3 days after each (every) administration of the anti-T cell antigen-binding molecule in the first dosing cycle, and (b) on the same day as, or 1 day, 2 days, or 3 days after the first administration in each of the second and subsequent dosing cycles (when the anti-T cell antigen-binding molecule is administered repeatedly in dosing cycles where 2, 3, 4, or 5 administrations constitute one cycle, and pre-administration of the cytokine inhibitor is performed (a) 3 days before said each (every) administration of the anti-T cell antigen-binding molecule in the first dosing cycle, and (b) 3 days before the said first administration in each of the second and subsequent dosing cycles);
[0691] (a) on the same day as, or 1 day, 2 days, 3 days, or 4 days after each (every) administration of the anti-T cell antigen-binding molecule in the first dosing cycle, and (b) on the same day as, or 1 day, 2 days, 3 days, or 4 days after the first administration in each of the second and subsequent dosing cycles (when the anti-T cell antigen-binding molecule is administered repeatedly in dosing cycles where 2, 3, 4, or 5 administrations constitute one cycle, and pre-administration of the cytokine inhibitor is performed (a) 2 days before said each (every) administration of the anti-T cell antigen-binding molecule in the first dosing cycle, and (b) 2 days before the said first administration in each of the second and subsequent dosing cycles);
[0692] (a) on the same day as, or 1 day, 2 days, 3 days, 4 days, or 5 days after each (every) administration of the anti-T cell antigen-binding molecule in the first dosing cycle, and (b) on the same day as, or 1 day, 2 days, 3 days, 4 days, or 5 days after the first administration in each of the second and subsequent dosing cycles (when the anti-T cell antigen-binding molecule is administered repeatedly in dosing cycles where 2, 3, 4, or 5 administrations constitute one cycle, and pre-administration of the cytokine inhibitor is performed (a) 1 day before said each (every) administration of the anti-T cell antigen-binding molecule in the first dosing cycle, and (b) 1 day before the said first administration in each of the second and subsequent dosing cycles); or
[0693] (a) 1 day, 2 days, 3 days, 4 days, 5 days, or 6 days after each (every) administration of the anti-T cell antigen-binding molecule in the first dosing cycle, and (b) 1 day, 2 days, 3 days, 4 days, 5 days, or 6 days after the first administration in each of the second and subsequent dosing cycles (when the anti-T cell antigen-binding molecule is administered repeatedly in dosing cycles where 2, 3, 4, or 5 administrations constitute one cycle, and pre-administration of the cytokine inhibitor is performed (a) on the same day as said each (every) administration of the anti-T cell antigen-binding molecule in the first dosing cycle, and (b) on the same day as the said first administration in each of the second and subsequent dosing cycles).

### (Repeated Administration of the Anti-T Cell Antigen-Binding Molecule at Intervals of Once Every 2 Weeks)

[0694] In one embodiment, in the combination therapy of the present disclosure, (i) an anti-T cell antigen-binding molecule is administered repeatedly in dosing cycles where 2, 3, 4, or 5 administrations constitute one cycle, (ii) intervals of repeated administrations of the anti-T cell antigen-binding molecule are once every 2 weeks, and (iii) pre-administration of a cytokine inhibitor is performed for the first administration of the anti-T cell antigen-binding molecule in each of the dosing cycles. As specific examples, (i) an anti-T cell antigen-binding molecule is administered repeatedly in dosing cycles where 2, 3, 4, or 5 administrations constitute one cycle, (ii) intervals of repeated administrations of the anti-T cell antigen-binding molecule are once every 2 weeks, and (iii) pre-administration of a cytokine inhibitor is performed according to the following embodiment:
[0695] the anti-T cell antigen-binding molecule is administered repeatedly in dosing cycles where 2, 3, 4, or 5 administrations constitute one cycle, and the cytokine inhibitor is administered before administration of the anti-T cell antigen-binding molecule, which is 6 days before the first administration in each of the dosing cycles;
[0696] the anti-T cell antigen-binding molecule is administered repeatedly in dosing cycles where 2, 3, 4, or 5 administrations constitute one cycle, and the cytokine inhibitor is administered before administration of the anti-T cell antigen-binding molecule, which is 5 days before the first administration in each of the dosing cycles;
[0697] the anti-T cell antigen-binding molecule is administered repeatedly in dosing cycles where 2, 3, 4, or 5 administrations constitute one cycle, and the cytokine inhibitor is administered before administration of the anti-T cell antigen-binding molecule, which is 4 days before the first administration in each of the dosing cycles;
[0698] the anti-T cell antigen-binding molecule is administered repeatedly in dosing cycles where 2, 3, 4, or 5 administrations constitute one cycle, and the cytokine inhibitor is administered before administration of the anti-T cell antigen-binding molecule, which is 3 days before the first administration in each of the dosing cycles;
[0699] the anti-T cell antigen-binding molecule is administered repeatedly in dosing cycles where 2, 3, 4, or 5 administrations constitute one cycle, and the cytokine inhibitor is administered before administration of the anti-T cell antigen-binding molecule, which is 2 days before the first administration in each of the dosing cycles;
[0700] the anti-T cell antigen-binding molecule is administered repeatedly in dosing cycles where 2, 3, 4, or 5 administrations constitute one cycle, and the cytokine inhibitor is administered before administration of the anti-T cell antigen-binding molecule, which is 1 day before the first administration in each of the dosing cycles;
[0701] the anti-T cell antigen-binding molecule is administered repeatedly in dosing cycles where 2, 3, 4, or 5 administrations constitute one cycle, and the cytokine inhibitor is administered before administration of the anti-T cell antigen-binding molecule, on the same day as the first administration in each of the dosing cycles; or
[0702] the anti-T cell antigen-binding molecule is administered repeatedly in dosing cycles where 2, 3, 4, or 5 administrations constitute one cycle, and the cytokine inhibitor is administered simultaneously with administration of the anti-T cell antigen-binding molecule, on the same day as the first administration in each of the dosing cycles.

[0703] In a further embodiment, in the combination therapy of the present disclosure, in addition to pre-administration of a cytokine inhibitor according to the above embodiment, the cytokine inhibitor may be further administered to an individual on the same day as, or 1 day, 2 days, 3 days, 4 days, 5 days, or 6 days after administration of the anti-T cell antigen-binding molecule. As specific examples, the cytokine inhibitor may be further administered as follows:
[0704] on the same day as, or 1 day, 2 days, 3 days, 4 days, 5 days, or 6 days after the first administration of the anti-T cell antigen-binding molecule in each of the dosing cycles (when the anti-T cell antigen-binding molecule is administered repeatedly at intervals of once every 2 weeks, in dosing cycles where 2, 3, 4, or 5 administrations constitute one cycle, and pre-administration of the cytokine inhibitor is performed 6 days, 5 days, 4 days, 3 days, 2 days, or 1 day before the said first administration of the anti-T cell antigen-binding molecule in each of the dosing cycles); or
[0705] 1 day, 2 days, 3 days, 4 days, 5 days, or 6 days after the first administration of the anti-T cell antigen-binding molecule in each of the dosing cycles (when the anti-T cell antigen-binding molecule is administered repeatedly at intervals of once every 2 weeks, in dosing cycles where 2, 3, 4, or 5 administrations constitute one cycle, and pre-administration of the cytokine inhibitor is performed on the same day as the said first administration of the anti-T cell antigen-binding molecule in each of the dosing cycles).

[0706] In another embodiment, in the combination therapy of the present disclosure, (i) an anti-T cell antigen-binding molecule is administered repeatedly in dosing cycles where 2, 3, 4, or 5 administrations constitute one cycle, (ii) intervals of repeated administrations of the anti-T cell antigen-binding molecule are once every 2 weeks, and (iii) pre-administration of a cytokine inhibitor is performed (a) for each (every) administration of the anti-T cell antigen-binding molecule in the first dosing cycle, and (b) for the first administration in each of the second and subsequent dosing cycles. As specific examples, (i) an anti-T cell antigen-binding molecule is administered repeatedly in dosing cycles where 2, 3, 4, or 5 administrations constitute one cycle, (ii) intervals of repeated administrations of the anti-T cell antigen-binding molecule are once every 2 weeks, and (iii) pre-administration of a cytokine inhibitor is performed according to the following embodiment:
[0707] the cytokine inhibitor is administered before administration of the anti-T cell antigen-binding molecule, which is (a) 6 days before each (every) administration of the anti-T cell antigen-binding molecule in the first dosing cycle, and (b) 6 days before the first administration in each of the second and subsequent dosing cycles;
[0708] the cytokine inhibitor is administered before administration of the anti-T cell antigen-binding molecule, which is (a) 5 days before each (every) administration of the anti-T cell antigen-binding molecule in the first dosing cycle, and (b) 5 days before the first administration in each of the second and subsequent dosing cycles;
[0709] the cytokine inhibitor is administered before administration of the anti-T cell antigen-binding molecule, which is (a) 4 days before each (every) administration of the anti-T cell antigen-binding molecule in the first dosing cycle, and (b) 4 days before the first administration in each of the second and subsequent dosing cycles;
[0710] the cytokine inhibitor is administered before administration of the anti-T cell antigen-binding molecule, which is (a) 3 days before each (every) administration of the anti-T cell antigen-binding molecule in the first dosing cycle, and (b) 3 days before the first administration in each of the second and subsequent dosing cycles;
[0711] the cytokine inhibitor is administered before administration of the anti-T cell antigen-binding molecule, which is (a) 2 days before each (every) administration of the anti-T cell antigen-binding molecule in the first dosing cycle, and (b) 2 days before the first administration in each of the second and subsequent dosing cycles;
[0712] the cytokine inhibitor is administered before administration of the anti-T cell antigen-binding molecule, which is (a) 1 day before each (every) administration of the anti-T cell antigen-binding molecule in the first dosing cycle, and (b) 1 day before the first administration in each of the second and subsequent dosing cycles;
[0713] the cytokine inhibitor is administered before administration of the anti-T cell antigen-binding molecule (a) on the same day as each (every) administration of the anti-T cell antigen-binding molecule in the first dosing cycle, and (b) on the same day as the first administration in each of the second and subsequent dosing cycles; or
[0714] the cytokine inhibitor is administered simultaneously with administration of the anti-T cell antigen-binding molecule (a) on the same day as each (every) administration of the anti-T cell antigen-binding molecule in the first dosing cycle, and (b) on the same day as the first administration in each of the second and subsequent dosing cycles.

[0715] In a further embodiment, in the combination therapy of the present disclosure, in addition to pre-administration of a cytokine inhibitor according to the above embodiment, the cytokine inhibitor may be further administered to an individual on the same day as, or 1 day, 2 days, 3 days, 4 days, 5 days, or 6 days after administration of the anti-T cell antigen-binding molecule. As specific examples, the cytokine inhibitor may be further administered as follows:
[0716] (a) on the same day as, or 1 day, 2 days, 3 days, 4 days, 5 days, or 6 days after each (every) administration of the anti-T cell antigen-binding molecule in the first dosing cycle, and (b) on the same day as, or 1 day, 2 days, 3 days, 4 days, 5 days, or 6 days after the first administration in each of the second and subsequent dosing cycles (when the anti-T cell antigen-binding molecule is administered repeatedly at intervals of once every 2 weeks, in dosing cycles where 2, 3, 4, or 5 administrations constitute one cycle, and pre-administration of the cytokine inhibitor is performed (a) 6 days, 5 days, 4 days, 3 days, 2 days, or 1 day before said each (every) administration of the anti-T cell antigen-binding molecule in the first dosing cycle, and (b) 6 days, 5 days, 4 days, 3 days, 2 days, or 1 day before the said first administration in each of the second and subsequent dosing cycles); or
[0717] (a) 1 day, 2 days, 3 days, 4 days, 5 days, or 6 days after each (every) administration of the anti-T cell antigen-binding molecule in the first dosing cycle, and (b) 1 day, 2 days, 3 days, 4 days, 5 days, or 6 days after the first administration in each of the second and subsequent dosing cycles (when the anti-T cell antigen-binding molecule is administered repeatedly at intervals of once every 2 weeks, in dosing cycles where 2, 3, 4, or 5 administrations constitute one cycle, and pre-administration of the cytokine inhibitor is performed (a) on the same day as said each (every) administration of the anti-T cell antigen-binding molecule in the first dosing cycle, and (b) on the same day as the said first administration in each of the second and subsequent dosing cycles).

### (Repeated Administration of the Anti-T Cell Antigen-Binding Molecule at Intervals of Once Every 3 Weeks)

[0718] In one embodiment, in the combination therapy of the present disclosure, (i) an anti-T cell antigen-binding molecule is administered repeatedly in dosing cycles where 2, 3, 4, or 5 administrations constitute one cycle, (ii) intervals of repeated administrations of the anti-T cell antigen-binding molecule are once every 3 weeks, and (iii) pre-administration of a cytokine inhibitor is performed for the first administration of the anti-T cell antigen-binding molecule in each of the dosing cycles. As specific examples, (i) an anti-T cell antigen-binding molecule is administered repeatedly in dosing cycles where 2, 3, 4, or 5 administrations constitute one cycle, (ii) intervals of repeated administrations of the anti-T cell antigen-binding molecule are once every 3 weeks, and (iii) pre-administration of a cytokine inhibitor is performed according to the following embodiment:
[0719] the anti-T cell antigen-binding molecule is administered repeatedly in dosing cycles where 2, 3, 4, or 5 administrations constitute one cycle, and the cytokine inhibitor is administered before administration of the anti-T cell antigen-binding molecule, which is 6 days before the first administration in each of the dosing cycles;
[0720] the anti-T cell antigen-binding molecule is administered repeatedly in dosing cycles where 2, 3, 4, or 5 administrations constitute one cycle, and the cytokine inhibitor is administered before administration of the anti-T cell antigen-binding molecule, which is 5 days before the first administration in each of the dosing cycles;
[0721] the anti-T cell antigen-binding molecule is administered repeatedly in dosing cycles where 2, 3, 4, or 5 administrations constitute one cycle, and the cytokine inhibitor is administered before administration of the anti-T cell antigen-binding molecule, which is 4 days before the first administration in each of the dosing cycles;
[0722] the anti-T cell antigen-binding molecule is administered repeatedly in dosing cycles where 2, 3, 4, or 5 administrations constitute one cycle, and the cytokine inhibitor is administered before administration of the anti-T cell antigen-binding molecule, which is 3 days before the first administration in each of the dosing cycles;
[0723] the anti-T cell antigen-binding molecule is administered repeatedly in dosing cycles where 2, 3, 4, or 5 administrations constitute one cycle, and the cytokine inhibitor is administered before administration of the anti-T cell antigen-binding molecule, which is 2 days before the first administration in each of the dosing cycles;
[0724] the anti-T cell antigen-binding molecule is administered repeatedly in dosing cycles where 2, 3, 4, or 5 administrations constitute one cycle, and the cytokine inhibitor is administered before administration of the anti-T cell antigen-binding molecule, which is 1 day before the first administration in each of the dosing cycles;
[0725] the anti-T cell antigen-binding molecule is administered repeatedly in dosing cycles where 2, 3, 4, or 5 administrations constitute one cycle, and the cytokine inhibitor is administered before administration of the anti-T cell antigen-binding molecule, on the same day as the first administration in each of the dosing cycles; or
[0726] the anti-T cell antigen-binding molecule is administered repeatedly in dosing cycles where 2, 3, 4, or 5 administrations constitute one cycle, and the cytokine inhibitor is administered simultaneously with administration of the anti-T cell antigen-binding molecule, on the same day as the first administration in each of the dosing cycles.

[0727] In a further embodiment, in the combination therapy of the present disclosure, in addition to pre-administration of a cytokine inhibitor according to the above embodiment, the cytokine inhibitor may be further administered to an individual on the same day as, or 1 day, 2 days, 3 days, 4 days, 5 days, or 6 days after administration of the anti-T cell antigen-binding molecule. As specific examples, the cytokine inhibitor may be further administered as follows:
[0728] on the same day as, or 1 day, 2 days, 3 days, 4 days, 5 days, or 6 days after the first administration of the anti-T cell antigen-binding molecule in each of the dosing cycles (when the anti-T cell antigen-binding molecule is administered repeatedly at intervals of once every 3 weeks, in dosing cycles where 2, 3, 4, or 5 administrations constitute one cycle, and pre-administration of the cytokine inhibitor is performed 6 days, 5 days, 4 days, 3 days, 2 days, or 1 day before the said first administration of the anti-T cell antigen-binding molecule in each of the dosing cycles); or
[0729] 1 day, 2 days, 3 days, 4 days, 5 days, or 6 days after the first administration of the anti-T cell antigen-binding molecule in each of the dosing cycles (when the anti-T cell antigen-binding molecule is administered repeatedly at intervals of once every 3 weeks, in dosing cycles where 2, 3, 4, or 5 administrations constitute one cycle, and pre-administration of the cytokine inhibitor is performed on the same day as the said first administration of the anti-T cell antigen-binding molecule in each of the dosing cycles).

[0730] In another embodiment, in the combination therapy of the present disclosure, (i) an anti-T cell antigen-binding molecule is administered repeatedly in dosing cycles where 2, 3, 4, or 5 administrations constitute one cycle, (ii) intervals of repeated administrations of the anti-T cell antigen-binding molecule are once every 3 weeks, and (iii) pre-administration of a cytokine inhibitor is performed (a) for each (every) administration of the anti-T cell antigen-binding molecule in the first dosing cycle, and (b) for the first administration in each of the second and subsequent dosing cycles. As specific examples, (i) an anti-T cell antigen-binding molecule is administered repeatedly in dosing cycles where 2, 3, 4, or 5 administrations constitute one cycle, (ii) intervals of repeated administrations of the anti-T cell antigen-binding molecule are once every 3 weeks, and (iii) pre-administration of a cytokine inhibitor is performed according to the following embodiment:
[0731] the cytokine inhibitor is administered before administration of the anti-T cell antigen-binding molecule, which is (a) 6 days before each (every) administration of the anti-T cell antigen-binding molecule in the first dosing cycle, and (b) 6 days before the first administration in each of the second and subsequent dosing cycles;
[0732] the cytokine inhibitor is administered before administration of the anti-T cell antigen-binding molecule, which is (a) 5 days before each (every) administration of the anti-T cell antigen-binding molecule in the first dosing cycle, and (b) 5 days before the first administration in each of the second and subsequent dosing cycles;
[0733] the cytokine inhibitor is administered before administration of the anti-T cell antigen-binding molecule, which is (a) 4 days before each (every) administration of the anti-T cell antigen-binding molecule in the first dosing cycle, and (b) 4 days before the first administration in each of the second and subsequent dosing cycles;
[0734] the cytokine inhibitor is administered before administration of the anti-T cell antigen-binding molecule, which is (a) 3 days before each (every) administration of the anti-T cell antigen-binding molecule in the first dosing cycle, and (b) 3 days before the first administration in each of the second and subsequent dosing cycles;
[0735] the cytokine inhibitor is administered before administration of the anti-T cell antigen-binding molecule, which is (a) 2 days before each (every) administration of the anti-T cell antigen-binding molecule in the first dosing cycle, and (b) 2 days before the first administration in each of the second and subsequent dosing cycles;
[0736] the cytokine inhibitor is administered before administration of the anti-T cell antigen-binding molecule, which is (a) 1 day before each (every) administration of the anti-T cell antigen-binding molecule in the first dosing cycle, and (b) 1 day before the first administration in each of the second and subsequent dosing cycles;
[0737] the cytokine inhibitor is administered before administration of the anti-T cell antigen-binding molecule (a) on the same day as each (every) administration of the anti-T cell antigen-binding molecule in the first dosing cycle, and (b) on the same day as the first administration in each of the second and subsequent dosing cycles; or
[0738] the cytokine inhibitor is administered simultaneously with administration of the anti-T cell antigen-binding molecule (a) on the same day as each (every) administration of the anti-T cell antigen-binding molecule in the first dosing cycle, and (b) on the same day as the first administration in each of the second and subsequent dosing cycles.

[0739] In a further embodiment, in the combination therapy of the present disclosure, in addition to pre-administration of a cytokine inhibitor according to the above embodiment, the cytokine inhibitor may be further administered to an individual on the same day as, or 1 day, 2 days, 3 days, 4 days, 5 days, or 6 days after administration of the anti-T cell antigen-binding molecule. As specific examples, the cytokine inhibitor may be further administered as follows:
[0740] (a) on the same day as, or 1 day, 2 days, 3 days, 4 days, 5 days, or 6 days after each (every) administration of the anti-T cell antigen-binding molecule in the first dosing cycle, and (b) on the same day as, or 1 day, 2 days, 3 days, 4 days, 5 days, or 6 days after the first administration in each of the second and subsequent dosing cycles (when the anti-T cell antigen-binding molecule is administered repeatedly at intervals of once every 3 weeks, in dosing cycles where 2, 3, 4, or 5 administrations constitute one cycle, and pre-administration of the cytokine inhibitor is performed (a) 6 days, 5 days, 4 days, 3 days, 2 days, or 1 day before said each (every) administration of the anti-T cell antigen-binding molecule in the first dosing cycle, and (b) 6 days, 5 days, 4 days, 3 days, 2 days, or 1 day before the said first administration in each of the second and subsequent dosing cycles); or
[0741] (a) 1 day, 2 days, 3 days, 4 days, 5 days, or 6 days after each (every) administration of the anti-T cell antigen-binding molecule in the first dosing cycle, and (b) 1 day, 2 days, 3 days, 4 days, 5 days, or 6 days after the first administration in each of the second and subsequent dosing cycles (when the anti-T cell antigen-binding molecule is administered repeatedly at intervals of once every 3 weeks, in dosing cycles where 2, 3, 4, or 5 administrations constitute one cycle, and pre-administration of the cytokine inhibitor is performed (a) on the same day as said each (every) administration of the anti-T cell antigen-binding molecule in the first dosing cycle, and (b) on the same day as the said first administration in each of the second and subsequent dosing cycles).

### Repeated Administration of the Anti-T Cell Antigen-Binding Molecule at Intervals of Once Every 4 Weeks)

[0742] In one embodiment, in the combination therapy of the present disclosure, (i) an anti-T cell antigen-binding molecule is administered repeatedly in dosing cycles where 2, 3, 4, or 5 administrations constitute one cycle, (ii) intervals of repeated administrations of the anti-T cell antigen-binding molecule are once every 4 weeks, and (iii) pre-administration of a cytokine inhibitor is performed for the first administration of the anti-T cell antigen-binding molecule in each of the dosing cycles. As specific examples, (i) an anti-T cell antigen-binding molecule is administered repeatedly in dosing cycles where 2, 3, 4, or 5 administrations constitute one cycle, (ii) intervals of repeated administrations of the anti-T cell antigen-binding molecule are once every 4 weeks, and (iii) pre-administration of a cytokine inhibitor is performed according to the following embodiment:
[0743] the anti-T cell antigen-binding molecule is administered repeatedly in dosing cycles where 2, 3, 4, or 5 administrations constitute one cycle, and the cytokine inhibitor is administered before administration of the anti-T cell antigen-binding molecule, which is 6 days before the first administration in each of the dosing cycles;
[0744] the anti-T cell antigen-binding molecule is administered repeatedly in dosing cycles where 2, 3, 4, or 5 administrations constitute one cycle, and the cytokine inhibitor is administered before administration of the anti-T cell antigen-binding molecule, which is 5 days before the first administration in each of the dosing cycles;
[0745] the anti-T cell antigen-binding molecule is administered repeatedly in dosing cycles where 2, 3, 4, or 5 administrations constitute one cycle, and the cytokine inhibitor is administered before administration of the anti-T cell antigen-binding molecule, which is 4 days before the first administration in each of the dosing cycles;
[0746] the anti-T cell antigen-binding molecule is administered repeatedly in dosing cycles where 2, 3, 4, or 5 administrations constitute one cycle, and the cytokine inhibitor is administered before administration of the anti-T cell antigen-binding molecule, which is 3 days before the first administration in each of the dosing cycles;
[0747] the anti-T cell antigen-binding molecule is administered repeatedly in dosing cycles where 2, 3, 4, or 5 administrations constitute one cycle, and the cytokine inhibitor is administered before administration of the anti-T cell antigen-binding molecule, which is 2 days before the first administration in each of the dosing cycles;
[0748] the anti-T cell antigen-binding molecule is administered repeatedly in dosing cycles where 2, 3, 4, or 5 administrations constitute one cycle, and the cytokine inhibitor is administered before administration of the anti-T cell antigen-binding molecule, which is 1 day before the first administration in each of the dosing cycles;
[0749] the anti-T cell antigen-binding molecule is administered repeatedly in dosing cycles where 2, 3, 4, or 5 administrations constitute one cycle, and the cytokine inhibitor is administered before administration of the anti-T cell antigen-binding molecule, on the same day as the first administration in each of the dosing cycles; or
[0750] the anti-T cell antigen-binding molecule is administered repeatedly in dosing cycles where 2, 3, 4, or 5 administrations constitute one cycle, and the cytokine inhibitor is administered simultaneously with administration of the anti-T cell antigen-binding molecule, on the same day as the first administration in each of the dosing cycles.

[0751] In a further embodiment, in the combination therapy of the present disclosure, in addition to pre-administration of a cytokine inhibitor according to the above embodiment, the cytokine inhibitor may be further administered to an individual on the same day as, or 1 day, 2 days, 3 days, 4 days, 5 days, or 6 days after administration of the anti-T cell antigen-binding molecule. As specific examples, the cytokine inhibitor may be further administered as follows:
[0752] on the same day as, or 1 day, 2 days, 3 days, 4 days, 5 days, or 6 days after the first administration of the anti-T cell antigen-binding molecule in each of the dosing cycles (when the anti-T cell antigen-binding molecule is administered repeatedly at intervals of once every 4 weeks, in dosing cycles where 2, 3, 4, or 5 administrations constitute one cycle, and pre-administration of the cytokine inhibitor is performed 6 days, 5 days, 4 days, 3 days, 2 days, or 1 day before the said first administration of the anti-T cell antigen-binding molecule in each of the dosing cycles); or
[0753] 1 day, 2 days, 3 days, 4 days, 5 days, or 6 days after the first administration of the anti-T cell antigen-binding molecule in each of the dosing cycles (when the anti-T cell antigen-binding molecule is administered repeatedly at intervals of once every 4 weeks, in dosing cycles where 2, 3, 4, or 5 administrations constitute one cycle, and pre-administration of the cytokine inhibitor is performed on the same day as the said first administration of the anti-T cell antigen-binding molecule in each of the dosing cycles).

[0754] In another embodiment, in the combination therapy of the present disclosure, (i) an anti-T cell antigen-binding molecule is administered repeatedly in dosing cycles where 2, 3, 4, or 5 administrations constitute one cycle, (ii) intervals of repeated administrations of the anti-T cell antigen-binding molecule are once every 4 weeks, and (iii) pre-administration of a cytokine inhibitor is performed (a) for each (every) administration of the anti-T cell antigen-binding molecule in the first dosing cycle, and (b) for the first administration in each of the second and subsequent dosing cycles. As specific examples, (i) an anti-T cell antigen-binding molecule is administered repeatedly in dosing cycles where 2, 3, 4, or 5 administrations constitute one cycle, (ii) intervals of repeated administrations of the anti-T cell antigen-binding molecule are once every 4 weeks, and (iii) pre-administration of a cytokine inhibitor is performed according to the following embodiment:
[0755] the cytokine inhibitor is administered before administration of the anti-T cell antigen-binding molecule, which is (a) 6 days before each (every) administration of the anti-T cell antigen-binding molecule in the first dosing cycle, and (b) 6 days before the first administration in each of the second and subsequent dosing cycles;
[0756] the cytokine inhibitor is administered before administration of the anti-T cell antigen-binding molecule, which is (a) 5 days before each (every) administration of the anti-T cell antigen-binding molecule in the first dosing cycle, and (b) 5 days before the first administration in each of the second and subsequent dosing cycles;
[0757] the cytokine inhibitor is administered before administration of the anti-T cell antigen-binding molecule, which is (a) 4 days before each (every) administration of the anti-T cell antigen-binding molecule in the first dosing cycle, and (b) 4 days before the first administration in each of the second and subsequent dosing cycles;
[0758] the cytokine inhibitor is administered before administration of the anti-T cell antigen-binding molecule, which is (a) 3 days before each (every) administration of the anti-T cell antigen-binding molecule in the first dosing cycle, and (b) 3 days before the first administration in each of the second and subsequent dosing cycles;
[0759] the cytokine inhibitor is administered before administration of the anti-T cell antigen-binding molecule, which is (a) 2 days before each (every) administration of the anti-T cell antigen-binding molecule in the first dosing cycle, and (b) 2 days before the first administration in each of the second and subsequent dosing cycles;
[0760] the cytokine inhibitor is administered before administration of the anti-T cell antigen-binding molecule, which is (a) 1 day before each (every) administration of the anti-T cell antigen-binding molecule in the first dosing cycle, and (b) 1 day before the first administration in each of the second and subsequent dosing cycles;
[0761] the cytokine inhibitor is administered before administration of the anti-T cell antigen-binding molecule (a) on the same day as each (every) administration of the anti-T cell antigen-binding molecule in the first dosing cycle, and (b) on the same day as the first administration in each of the second and subsequent dosing cycles; or
[0762] the cytokine inhibitor is administered simultaneously with administration of the anti-T cell antigen-binding molecule (a) on the same day as each (every) administration of the anti-T cell antigen-binding molecule in the first dosing cycle, and (b) on the same day as the first administration in each of the second and subsequent dosing cycles.

[0763] In a further embodiment, in the combination therapy of the present disclosure, in addition to pre-administration of a cytokine inhibitor according to the above embodiment, the cytokine inhibitor may be further administered to an individual on the same day as, or 1 day, 2 days, 3 days, 4 days, 5 days, or 6 days after administration of the anti-T cell antigen-binding molecule. As specific examples, the cytokine inhibitor may be further administered as follows:
[0764] (a) on the same day as, or 1 day, 2 days, 3 days, 4 days, 5 days, or 6 days after each (every) administration of the anti-T cell antigen-binding molecule in the first dosing cycle, and (b) on the same day as, or 1 day, 2 days, 3 days, 4 days, 5 days, or 6 days after the first administration in each of the second and subsequent dosing cycles (when the anti-T cell antigen-binding molecule is administered repeatedly at intervals of once every 4 weeks, in dosing cycles where 2, 3, 4, or 5 administrations constitute one cycle, and pre-administration of the cytokine inhibitor is performed (a) 6 days, 5 days, 4 days, 3 days, 2 days, or 1 day before said each (every) administration of the anti-T cell antigen-binding molecule in the first dosing cycle, and (b) 6 days, 5 days, 4 days, 3 days, 2 days, or 1 day before the said first administration in each of the second and subsequent dosing cycles); or
[0765] (a) 1 day, 2 days, 3 days, 4 days, 5 days, or 6 days after each (every) administration of the anti-T cell antigen-binding molecule in the first dosing cycle, and (b) 1 day, 2 days, 3 days, 4 days, 5 days, or 6 days after the first administration in each of the second and subsequent dosing cycles (when the anti-T cell antigen-binding molecule is administered repeatedly at intervals of once every 4 weeks, in dosing cycles where 2, 3, 4, or 5 administrations constitute one cycle, and pre-administration of the cytokine inhibitor is performed (a) on the same day as said each (every) administration of the anti-T cell antigen-binding molecule in the first dosing cycle, and (b) on the same day as the said first administration in each of the second and subsequent dosing cycles).

### (Repeated Administration of the Anti-T Cell Antigen-Binding Molecule at Intervals of Once Every 5 Weeks)

[0766] In one embodiment, in the combination therapy of the present disclosure, (i) an anti-T cell antigen-binding molecule is administered repeatedly in dosing cycles where 2, 3, 4, or 5 administrations constitute one cycle, (ii) intervals of repeated administrations of the anti-T cell antigen-binding molecule are once every 5 weeks, and (iii) pre-administration of a cytokine inhibitor is performed for the first administration of the anti-T cell antigen-binding molecule in each of the dosing cycles. As specific examples, (i) an anti-T cell antigen-binding molecule is administered repeatedly in dosing cycles where 2, 3, 4, or 5 administrations constitute one cycle, (ii) intervals of repeated administrations of the anti-T cell antigen-binding molecule are once every 5 weeks, and (iii) pre-administration of a cytokine inhibitor is performed according to the following embodiment:
[0767] the anti-T cell antigen-binding molecule is administered repeatedly in dosing cycles where 2, 3, 4, or 5 administrations constitute one cycle, and the cytokine inhibitor is administered before administration of the anti-T cell antigen-binding molecule, which is 6 days before the first administration in each of the dosing cycles;
[0768] the anti-T cell antigen-binding molecule is administered repeatedly in dosing cycles where 2, 3, 4, or 5 administrations constitute one cycle, and the cytokine inhibitor is administered before administration of the anti-T cell antigen-binding molecule, which is 5 days before the first administration in each of the dosing cycles;
[0769] the anti-T cell antigen-binding molecule is administered repeatedly in dosing cycles where 2, 3, 4, or 5 administrations constitute one cycle, and the cytokine inhibitor is administered before administration of the anti-T cell antigen-binding molecule, which is 4 days before the first administration in each of the dosing cycles;
[0770] the anti-T cell antigen-binding molecule is administered repeatedly in dosing cycles where 2, 3, 4, or 5 administrations constitute one cycle, and the cytokine inhibitor is administered before administration of the anti-T cell antigen-binding molecule, which is 3 days before the first administration in each of the dosing cycles;
[0771] the anti-T cell antigen-binding molecule is administered repeatedly in dosing cycles where 2, 3, 4, or 5 administrations constitute one cycle, and the cytokine inhibitor is administered before administration of the anti-T cell antigen-binding molecule, which is 2 days before the first administration in each of the dosing cycles;
[0772] the anti-T cell antigen-binding molecule is administered repeatedly in dosing cycles where 2, 3, 4, or 5 administrations constitute one cycle, and the cytokine inhibitor is administered before administration of the anti-T cell antigen-binding molecule, which is 1 day before the first administration in each of the dosing cycles;
[0773] the anti-T cell antigen-binding molecule is administered repeatedly in dosing cycles where 2, 3, 4, or 5 administrations constitute one cycle, and the cytokine inhibitor is administered before administration of the anti-T cell antigen-binding molecule, on the same day as the first administration in each of the dosing cycles; or
[0774] the anti-T cell antigen-binding molecule is administered repeatedly in dosing cycles where 2, 3, 4, or 5 administrations constitute one cycle, and the cytokine inhibitor is administered simultaneously with administration of the anti-T cell antigen-binding molecule, on the same day as the first administration in each of the dosing cycles.

[0775] In a further embodiment, in the combination therapy of the present disclosure, in addition to pre-administration of a cytokine inhibitor according to the above embodiment, the cytokine inhibitor may be further administered to an individual on the same day as, or 1 day, 2 days, 3 days, 4 days, 5 days, or 6 days after administration of the anti-T cell antigen-binding molecule. As specific examples, the cytokine inhibitor may be further administered as follows:
[0776] on the same day as, or 1 day, 2 days, 3 days, 4 days, 5 days, or 6 days after the first administration of the anti-T cell antigen-binding molecule in each of the dosing cycles (when the anti-T cell antigen-binding molecule is administered repeatedly at intervals of once every 5 weeks, in dosing cycles where 2, 3, 4, or 5 administrations constitute one cycle, and pre-administration of the cytokine inhibitor is performed 6 days, 5 days, 4 days, 3 days, 2 days, or 1 day before the said first administration of the anti-T cell antigen-binding molecule in each of the dosing cycles); or
[0777] 1 day, 2 days, 3 days, 4 days, 5 days, or 6 days after the first administration of the anti-T cell antigen-binding molecule in each of the dosing cycles (when the anti-T cell antigen-binding molecule is administered repeatedly at intervals of once every 5 weeks, in dosing cycles where 2, 3, 4, or 5 administrations constitute one cycle, and pre-administration of the cytokine inhibitor is performed on the same day as the said first administration of the anti-T cell antigen-binding molecule in each of the dosing cycles).

[0778] In another embodiment, in the combination therapy of the present disclosure, (i) an anti-T cell antigen-binding molecule is administered repeatedly in dosing cycles where 2, 3, 4, or 5 administrations constitute one cycle, (ii) intervals of repeated administrations of the anti-T cell antigen-binding molecule are once every 5 weeks, and (iii) pre-administration of a cytokine inhibitor is performed (a) for each (every) administration of the anti-T cell antigen-binding molecule in the first dosing cycle, and (b) for the first administration in each of the second and subsequent dosing cycles. As specific examples, (i) an anti-T cell antigen-binding molecule is administered repeatedly in dosing cycles where 2, 3, 4, or 5 administrations constitute one cycle, (ii) intervals of repeated administrations of the anti-T cell antigen-binding molecule are once every 5 weeks, and (iii) pre-administration of a cytokine inhibitor is performed according to the following embodiment:
[0779] the cytokine inhibitor is administered before administration of the anti-T cell antigen-binding molecule, which is (a) 6 days before each (every) administration of the anti-T cell antigen-binding molecule in the first dosing cycle, and (b) 6 days before the first administration in each of the second and subsequent dosing cycles;
[0780] the cytokine inhibitor is administered before administration of the anti-T cell antigen-binding molecule, which is (a) 5 days before each (every) administration of the anti-T cell antigen-binding molecule in the first dosing cycle, and (b) 5 days before the first administration in each of the second and subsequent dosing cycles;
[0781] the cytokine inhibitor is administered before administration of the anti-T cell antigen-binding molecule, which is (a) 4 days before each (every) administration of the anti-T cell antigen-binding molecule in the first dosing cycle, and (b) 4 days before the first administration in each of the second and subsequent dosing cycles;
[0782] the cytokine inhibitor is administered before administration of the anti-T cell antigen-binding molecule, which is (a) 3 days before each (every) administration of the anti-T cell antigen-binding molecule in the first dosing cycle, and (b) 3 days before the first administration in each of the second and subsequent dosing cycles;
[0783] the cytokine inhibitor is administered before administration of the anti-T cell antigen-binding molecule, which is (a) 2 days before each (every) administration of the anti-T cell antigen-binding molecule in the first dosing cycle, and (b) 2 days before the first administration in each of the second and subsequent dosing cycles;
[0784] the cytokine inhibitor is administered before administration of the anti-T cell antigen-binding molecule, which is (a) 1 day before each (every) administration of the anti-T cell antigen-binding molecule in the first dosing cycle, and (b) 1 day before the first administration in each of the second and subsequent dosing cycles;
[0785] the cytokine inhibitor is administered before administration of the anti-T cell antigen-binding molecule (a) on the same day as each (every) administration of the anti-T cell antigen-binding molecule in the first dosing cycle, and (b) on the same day as the first administration in each of the second and subsequent dosing cycles; or
[0786] the cytokine inhibitor is administered simultaneously with administration of the anti-T cell antigen-binding molecule (a) on the same day as each (every) administration of the anti-T cell antigen-binding molecule in the first dosing cycle, and (b) on the same day as the first administration in each of the second and subsequent dosing cycles.

[0787] In a further embodiment, in the combination therapy of the present disclosure, in addition to pre-administration of a cytokine inhibitor according to the above embodiment, the cytokine inhibitor may be further administered to an individual on the same day as, or 1 day, 2 days, 3 days, 4 days, 5 days, or 6 days after administration of the anti-T cell antigen-binding molecule. As specific examples, the cytokine inhibitor may be further administered as follows:
[0788] (a) on the same day as, or 1 day, 2 days, 3 days, 4 days, 5 days, or 6 days after each (every) administration of the anti-T cell antigen-binding molecule in the first dosing cycle, and (b) on the same day as, or 1 day, 2 days, 3 days, 4 days, 5 days, or 6 days after the first administration in each of the second and subsequent dosing cycles (when the anti-T cell antigen-binding molecule is administered repeatedly at intervals of once every 5 weeks, in dosing cycles where 2, 3, 4, or 5 administrations constitute one cycle, and pre-administration of the cytokine inhibitor is performed (a) 6 days, 5 days, 4 days, 3 days, 2 days, or 1 day before said each (every) administration of the anti-T cell antigen-binding molecule in the first dosing cycle, and (b) 6 days, 5 days, 4 days, 3 days, 2 days, or 1 day before the said first administration in each of the second and subsequent dosing cycles); or
[0789] (a) 1 day, 2 days, 3 days, 4 days, 5 days, or 6 days after each (every) administration of the anti-T cell antigen-binding molecule in the first dosing cycle, and (b) 1 day, 2 days, 3 days, 4 days, 5 days, or 6 days after the first administration in each of the second and subsequent dosing cycles (when the anti-T cell antigen-binding molecule is administered repeatedly at intervals of once every 5 weeks, in dosing cycles where 2, 3, 4, or 5 administrations constitute one cycle, and pre-administration of the cytokine inhibitor is performed (a) on the same day as said each (every) administration of the anti-T cell antigen-binding molecule in the first dosing cycle, and (b) on the same day as the said first administration in each of the second and subsequent dosing cycles).
   Administration of an Anti-T Cell Antigen-Binding Molecule (Comprising a Step-Up Dosing Period and a Subsequent Maintenance Dosing Period), Accompanied with Pre-Administration of a Cytokine Inhibitor

[0790] In one embodiment, in the combination therapy of the present disclosure, (i) a step-up dosing period and a subsequent maintenance dosing period are comprised for an anti-T cell antigen-binding molecule, and (ii) a cytokine inhibitor is administered before or simultaneously with each administration during the step-up dosing period and the maintenance dosing period.

[0791] In one embodiment, the dose of an anti-T cell antigen-binding molecule is increased stepwise during the step-up dosing period. Here, when the dose is “increased stepwise”, it means that the (n+1)th dose is larger than the nth dose. For example, when the anti-T cell antigen-binding molecule is administered twice during the step-up dosing period, the second dose is larger than the first dose. When the anti-T cell antigen-binding molecule is administered three times during the step-up dosing period, the second dose is larger than the first dose and the third dose is larger than the second dose. When the anti-T cell antigen-binding molecule is administered four times during the step-up dosing period, the second dose is larger than the first dose, the third dose is larger than the second dose, and the fourth dose is larger than the third dose. When the anti-T cell antigen-binding molecule is administered 5 times during the step-up dosing period, the second dose is larger than the first dose, the third dose is larger than the second dose, and the fourth dose is larger than the third dose, and the fifth dose is larger than the fourth dose. In one embodiment, the anti-T cell antigen-binding molecule is administered 2, 3, 4, 5, 6, 7, 8, 9, or 10 times during the step-up dosing period. In one embodiment, during the step-up dosing period, the anti-T cell antigen-binding molecule is administered at intervals of once every week, once every 2 weeks, once every 3 weeks, once every 4 weeks, or once every 5 weeks.

[0792] In one embodiment, the anti-T cell antigen-binding molecule is repeatedly administered at the same dose during the maintenance dosing period. In one embodiment, during the maintenance dosing period, the anti-T cell antigen-binding molecule is administered at intervals of once every week, once every 2 weeks, once every 3 weeks, once every 4 weeks, or once every 5 weeks. In a further embodiment, the dosing interval of the anti-T cell antigen-binding molecule during the maintenance dosing period is the same as the dosing interval of the anti-T cell antigen binding molecule during the step-up dosing period.

### When Pre-Administration of a Cytokine Inhibitor is Performed for Each (Every) Anti-T Cell Antigen-Binding Molecule Administration (Repeated Administration of the Anti-T Cell Antigen-Binding Molecule at Intervals of Once Every Week)

[0793] In one embodiment, in the combination therapy of the present disclosure (i) a step-up dosing period and a subsequent maintenance dosing period are comprised for an anti-T cell antigen-binding molecule, (ii) the anti-T cell antigen-binding molecule is administered repeatedly at intervals of once every week during the step-up dosing period and the maintenance dosing period, and (iii) pre-administration of a cytokine inhibitor is performed for each administration during the step-up dosing period and the maintenance dosing period. As specific examples, in the combination therapy of the present disclosure, (i) a step-up dosing period and a subsequent maintenance dosing period are comprised for an anti-T cell antigen-binding molecule, (ii) the anti-T cell antigen-binding molecule is administered repeatedly at intervals of once every week during the step-up dosing period and the maintenance dosing period, and (iii) pre-administration of a cytokine inhibitor is performed according to the following embodiment:
[0794] the cytokine inhibitor is administered before administration of the anti-T cell antigen-binding molecule, which is 6 days before each administration during the step-up dosing period and the maintenance dosing period;
[0795] the cytokine inhibitor is administered before administration of the anti-T cell antigen-binding molecule, which is 5 days before each administration during the step-up dosing period and the maintenance dosing period;
[0796] the cytokine inhibitor is administered before administration of the anti-T cell antigen-binding molecule, which is 4 days before each administration during the step-up dosing period and the maintenance dosing period;
[0797] the cytokine inhibitor is administered before administration of the anti-T cell antigen-binding molecule, which is 3 days before each administration during the step-up dosing period and the maintenance dosing period;
[0798] the cytokine inhibitor is administered before administration of the anti-T cell antigen-binding molecule, which is 2 days before each administration during the step-up dosing period and the maintenance dosing period;
[0799] the cytokine inhibitor is administered before administration of the anti-T cell antigen-binding molecule, which is 1 day before each administration during the step-up dosing period and the maintenance dosing period;
[0800] the cytokine inhibitor is administered before administration of the anti-T cell antigen-binding molecule, on the same day as each administration during the step-up dosing period and the maintenance dosing period; or
[0801] the cytokine inhibitor is administered simultaneously with administration of the anti-T cell antigen-binding molecule, on the same day as each administration during the step-up dosing period and the maintenance dosing period.

[0802] In a further embodiment, in the combination therapy of the present disclosure, in addition to pre-administration of a cytokine inhibitor according to the above embodiment, the cytokine inhibitor may be further administered to an individual on the same day as, or 1 day, 2 days, 3 days, 4 days, 5 days, or 6 days after the administration of the anti-T cell antigen-binding molecule. As specific examples, the cytokine inhibitor may be further administered as follows:
[0803] on the same day as the administration of the anti-T cell antigen-binding molecule (when the anti-T cell antigen-binding molecule is administered repeatedly at intervals of once every week, and pre-administration of the cytokine inhibitor is performed 6 days before each administration during the step-up dosing period and the maintenance dosing period);
[0804] on the same day as or 1 day after the administration of the anti-T cell antigen-binding molecule (when the anti-T cell antigen-binding molecule is administered repeatedly at intervals of once every week, and pre-administration of the cytokine inhibitor is performed 5 days before each administration during the step-up dosing period and the maintenance dosing period);
[0805] on the same day as, or 1 day or 2 days after the administration of the anti-T cell antigen-binding molecule (when the anti-T cell antigen-binding molecule is administered repeatedly at intervals of once every week, and pre-administration of the cytokine inhibitor is performed 4 days before each administration during the step-up dosing period and the maintenance dosing period);
[0806] on the same day as, or 1 day, 2 days, or 3 days after the administration of the anti-T cell antigen-binding molecule (when the anti-T cell antigen-binding molecule is administered repeatedly at intervals of once every week, and pre-administration of the cytokine inhibitor is performed 3 days before each administration during the step-up dosing period and the maintenance dosing period);
[0807] on the same day as, or 1 day, 2 days, 3 days, or 4 days after the administration of the anti-T cell antigen-binding molecule (when the anti-T cell antigen-binding molecule is administered repeatedly at intervals of once every week, and pre-administration of the cytokine inhibitor is performed 2 days before each administration during the step-up dosing period and the maintenance dosing period);
[0808] on the same day as, or 1 day, 2 days, 3 days, 4 days, or 5 days after the administration of the anti-T cell antigen-binding molecule (when the anti-T cell antigen-binding molecule is administered repeatedly at intervals of once every week, and pre-administration of the cytokine inhibitor is performed 1 day before each administration during the step-up dosing period and the maintenance dosing period); or
[0809] 1 day, 2 days, 3 days, 4 days, 5 days, or 6 days after the administration of the anti-T cell antigen-binding molecule (when the anti-T cell antigen-binding molecule is administered repeatedly at intervals of once every week, and pre-administration of the cytokine inhibitor is performed on the same day as each administration during the step-up dosing period and the maintenance dosing period).

### (Repeated Administration of the Anti-T Cell Antigen-Binding Molecule at Intervals of Once Every 2 Weeks)

[0810] In one embodiment, in the combination therapy of the present disclosure, (i) a step-up dosing period and a subsequent maintenance dosing period are comprised for an anti-T cell antigen-binding molecule, (ii) the anti-T cell antigen-binding molecule is administered repeatedly at intervals of once every 2 weeks during the step-up dosing period and the maintenance dosing period, and (iii) pre-administration of a cytokine inhibitor is performed for each administration during the step-up dosing period and the maintenance dosing period. As specific examples, in the combination therapy of the present disclosure, (i) a step-up dosing period and a subsequent maintenance dosing period are comprised for an anti-T cell antigen-binding molecule, (ii) the anti-T cell antigen-binding molecule is administered repeatedly at intervals of once every 2 weeks during the step-up dosing period and the maintenance dosing period, and (iii) pre-administration of a cytokine inhibitor is performed according to the following embodiment:
[0811] the cytokine inhibitor is administered before administration of the anti-T cell antigen-binding molecule, which is 6 days before each administration during the step-up dosing period and the maintenance dosing period;
[0812] the cytokine inhibitor is administered before administration of the anti-T cell antigen-binding molecule, which is 5 days before each administration during the step-up dosing period and the maintenance dosing period;
[0813] the cytokine inhibitor is administered before administration of the anti-T cell antigen-binding molecule, which is 4 days before each administration during the step-up dosing period and the maintenance dosing period;
[0814] the cytokine inhibitor is administered before administration of the anti-T cell antigen-binding molecule, which is 3 days before each administration during the step-up dosing period and the maintenance dosing period;
[0815] the cytokine inhibitor is administered before administration of the anti-T cell antigen-binding molecule, which is 2 days before each administration during the step-up dosing period and the maintenance dosing period;
[0816] the cytokine inhibitor is administered before administration of the anti-T cell antigen-binding molecule, which is 1 day before each administration during the step-up dosing period and the maintenance dosing period;
[0817] the cytokine inhibitor is administered before administration of the anti-T cell antigen-binding molecule, on the same day as each administration during the step-up dosing period and the maintenance dosing period; or
[0818] the cytokine inhibitor is administered simultaneously with administration of the anti-T cell antigen-binding molecule, on the same day as each administration during the step-up dosing period and the maintenance dosing period.

[0819] In a further embodiment, in the combination therapy of the present disclosure, in addition to pre-administration of a cytokine inhibitor according to the above embodiment, the cytokine inhibitor may be further administered to an individual on the same day as, or 1 day, 2 days, 3 days, 4 days, 5 days, or 6 days after the administration of the anti-T cell antigen-binding molecule. As specific examples, the cytokine inhibitor may be further administered as follows:
[0820] on the same day as, or 1 day, 2 days, 3 days, 4 days, 5 days, or 6 days after the administration of the anti-T cell antigen-binding molecule (when the anti-T cell antigen-binding molecule is administered repeatedly at intervals of once every 2 weeks, and pre-administration of the cytokine inhibitor is performed 6 days, 5 days, 4 days, 3 days, 2 days, or 1 day before each administration during the step-up dosing period and the maintenance dosing period); or
[0821] 1 day, 2 days, 3 days, 4 days, 5 days, or 6 days after the administration of the anti-T cell antigen-binding molecule (when the anti-T cell antigen-binding molecule is administered repeatedly at intervals of once every 2 weeks, and pre-administration of the cytokine inhibitor is performed on the same day as each administration during the step-up dosing period and the maintenance dosing period).

### (Repeated Administration of the Anti-T Cell Antigen-Binding Molecule at Intervals of Once Every 3 Weeks)

[0822] In one embodiment, in the combination therapy of the present disclosure, (i) a step-up dosing period and a subsequent maintenance dosing period are comprised for an anti-T cell antigen-binding molecule, (ii) the anti-T cell antigen-binding molecule is administered repeatedly at intervals of once every 3 weeks during the step-up dosing period and the maintenance dosing period, and (iii) pre-administration of a cytokine inhibitor is performed for each administration during the step-up dosing period and the maintenance dosing period. As specific examples, in the combination therapy of the present disclosure, (i) a step-up dosing period and a subsequent maintenance dosing period are comprised for an anti-T cell antigen-binding molecule, (ii) the anti-T cell antigen-binding molecule is administered repeatedly at intervals of once every 3 weeks during the step-up dosing period and the maintenance dosing period, and (iii) pre-administration of a cytokine inhibitor is performed according to the following embodiment:
[0823] the cytokine inhibitor is administered before administration of the anti-T cell antigen-binding molecule, which is 6 days before each administration during the step-up dosing period and the maintenance dosing period;
[0824] the cytokine inhibitor is administered before administration of the anti-T cell antigen-binding molecule, which is 5 days before each administration during the step-up dosing period and the maintenance dosing period;
[0825] the cytokine inhibitor is administered before administration of the anti-T cell antigen-binding molecule, which is 4 days before each administration during the step-up dosing period and the maintenance dosing period;
[0826] the cytokine inhibitor is administered before administration of the anti-T cell antigen-binding molecule, which is 3 days before each administration during the step-up dosing period and the maintenance dosing period;
[0827] the cytokine inhibitor is administered before administration of the anti-T cell antigen-binding molecule, which is 2 days before each administration during the step-up dosing period and the maintenance dosing period;
[0828] the cytokine inhibitor is administered before administration of the anti-T cell antigen-binding molecule, which is 1 day before each administration during the step-up dosing period and the maintenance dosing period;
[0829] the cytokine inhibitor is administered before administration of the anti-T cell antigen-binding molecule, on the same day as each administration during the step-up dosing period and the maintenance dosing period; or
[0830] the cytokine inhibitor is administered simultaneously with administration of the anti-T cell antigen-binding molecule, on the same day as each administration during the step-up dosing period and the maintenance dosing period.

[0831] In a further embodiment, in the combination therapy of the present disclosure, in addition to pre-administration of a cytokine inhibitor according to the above embodiment, the cytokine inhibitor may be further administered to an individual on the same day as, or 1 day, 2 days, 3 days, 4 days, 5 days, or 6 days after the administration of the anti-T cell antigen-binding molecule. As specific examples, the cytokine inhibitor may be further administered as follows:
[0832] on the same day as, or 1 day, 2 days, 3 days, 4 days, 5 days, or 6 days after the administration of the anti-T cell antigen-binding molecule (when the anti-T cell antigen-binding molecule is administered repeatedly at intervals of once every 3 weeks, and pre-administration of the cytokine inhibitor is performed 6 days, 5 days, 4 days, 3 days, 2 days, or 1 day before each administration during the step-up dosing period and the maintenance dosing period); or
[0833] 1 day, 2 days, 3 days, 4 days, 5 days, or 6 days after the administration of the anti-T cell antigen-binding molecule (when the anti-T cell antigen-binding molecule is administered repeatedly at intervals of once every 3 weeks, and pre-administration of the cytokine inhibitor is performed on the same day as each administration during the step-up dosing period and the maintenance dosing period).

### (Repeated Administration of the Anti-T Cell Antigen-Binding Molecule at Intervals of Once Every 4 Weeks)

[0834] In one embodiment, in the combination therapy of the present disclosure, (i) a step-up dosing period and a subsequent maintenance dosing period are comprised for an anti-T cell antigen-binding molecule, (ii) the anti-T cell antigen-binding molecule is administered repeatedly at intervals of once every 4 weeks during the step-up dosing period and the maintenance dosing period, and (iii) pre-administration of a cytokine inhibitor is performed for each administration during the step-up dosing period and the maintenance dosing period. As specific examples, in the combination therapy of the present disclosure, (i) a step-up dosing period and a subsequent maintenance dosing period are comprised for an anti-T cell antigen-binding molecule, (ii) the anti-T cell antigen-binding molecule is administered repeatedly at intervals of once every 4 weeks during the step-up dosing period and the maintenance dosing period, and (iii) pre-administration of a cytokine inhibitor is performed according to the following embodiment:
[0835] the cytokine inhibitor is administered before administration of the anti-T cell antigen-binding molecule, which is 6 days before each administration during the step-up dosing period and the maintenance dosing period;
[0836] the cytokine inhibitor is administered before administration of the anti-T cell antigen-binding molecule, which is 5 days before each administration during the step-up dosing period and the maintenance dosing period;
[0837] the cytokine inhibitor is administered before administration of the anti-T cell antigen-binding molecule, which is 4 days before each administration during the step-up dosing period and the maintenance dosing period;
[0838] the cytokine inhibitor is administered before administration of the anti-T cell antigen-binding molecule, which is 3 days before each administration during the step-up dosing period and the maintenance dosing period;
[0839] the cytokine inhibitor is administered before administration of the anti-T cell antigen-binding molecule, which is 2 days before each administration during the step-up dosing period and the maintenance dosing period;
[0840] the cytokine inhibitor is administered before administration of the anti-T cell antigen-binding molecule, which is 1 day before each administration during the step-up dosing period and the maintenance dosing period;
[0841] the cytokine inhibitor is administered before administration of the anti-T cell antigen-binding molecule, on the same day as each administration during the step-up dosing period and the maintenance dosing period; or
[0842] the cytokine inhibitor is administered simultaneously with administration of the anti-T cell antigen-binding molecule, on the same day as each administration during the step-up dosing period and the maintenance dosing period.

[0843] In a further embodiment, in the combination therapy of the present disclosure, in addition to pre-administration of a cytokine inhibitor according to the above embodiment, the cytokine inhibitor may be further administered to an individual on the same day as, or 1 day, 2 days, 3 days, 4 days, 5 days, or 6 days after the administration of the anti-T cell antigen-binding molecule. As specific examples, the cytokine inhibitor may be further administered as follows:
[0844] on the same day as, or 1 day, 2 days, 3 days, 4 days, 5 days, or 6 days after the administration of the anti-T cell antigen-binding molecule (when the anti-T cell antigen-binding molecule is administered repeatedly at intervals of once every 4 weeks, and pre-administration of the cytokine inhibitor is performed 6 days, 5 days, 4 days, 3 days, 2 days, or 1 day before each administration during the step-up dosing period and the maintenance dosing period); or
[0845] 1 day, 2 days, 3 days, 4 days, 5 days, or 6 days after the administration of the anti-T cell antigen-binding molecule (when the anti-T cell antigen-binding molecule is administered repeatedly at intervals of once every 4 weeks, and pre-administration of the cytokine inhibitor is performed on the same day as each administration during the step-up dosing period and the maintenance dosing period).

### (Repeated Administration of the Anti-T Cell Antigen-Binding Molecule at Intervals of Once Every 5 Weeks)

[0846] In one embodiment, in the combination therapy of the present disclosure, (i) a step-up dosing period and a subsequent maintenance dosing period are comprised for an anti-T cell antigen-binding molecule, (ii) the anti-T cell antigen-binding molecule is administered repeatedly at intervals of once every 5 weeks during the step-up dosing period and the maintenance dosing period, and (iii) pre-administration of a cytokine inhibitor is performed for each administration during the step-up dosing period and the maintenance dosing period. As specific examples, in the combination therapy of the present disclosure, (i) a step-up dosing period and a subsequent maintenance dosing period are comprised for an anti-T cell antigen-binding molecule, (ii) the anti-T cell antigen-binding molecule is administered repeatedly at intervals of once every 5 weeks during the step-up dosing period and the maintenance dosing period, and (iii) pre-administration of a cytokine inhibitor is performed according to the following embodiment:
[0847] the cytokine inhibitor is administered before administration of the anti-T cell antigen-binding molecule, which is 6 days before each administration during the step-up dosing period and the maintenance dosing period;
[0848] the cytokine inhibitor is administered before administration of the anti-T cell antigen-binding molecule, which is 5 days before each administration during the step-up dosing period and the maintenance dosing period;
[0849] the cytokine inhibitor is administered before administration of the anti-T cell antigen-binding molecule, which is 4 days before each administration during the step-up dosing period and the maintenance dosing period;
[0850] the cytokine inhibitor is administered before administration of the anti-T cell antigen-binding molecule, which is 3 days before each administration during the step-up dosing period and the maintenance dosing period;
[0851] the cytokine inhibitor is administered before administration of the anti-T cell antigen-binding molecule, which is 2 days before each administration during the step-up dosing period and the maintenance dosing period;
[0852] the cytokine inhibitor is administered before administration of the anti-T cell antigen-binding molecule, which is 1 day before each administration during the step-up dosing period and the maintenance dosing period;
[0853] the cytokine inhibitor is administered before administration of the anti-T cell antigen-binding molecule, on the same day as each administration during the step-up dosing period and the maintenance dosing period; or
[0854] the cytokine inhibitor is administered simultaneously with administration of the anti-T cell antigen-binding molecule, on the same day as each administration during the step-up dosing period and the maintenance dosing period.

[0855] In a further embodiment, in the combination therapy of the present disclosure, in addition to pre-administration of a cytokine inhibitor according to the above embodiment, the cytokine inhibitor may be further administered to an individual on the same day as, or 1 day, 2 days, 3 days, 4 days, 5 days, or 6 days after the administration of the anti-T cell antigen-binding molecule. As specific examples, the cytokine inhibitor may be further administered as follows:
[0856] on the same day as, or 1 day, 2 days, 3 days, 4 days, 5 days, or 6 days after the administration of the anti-T cell antigen-binding molecule (when the anti-T cell antigen-binding molecule is administered repeatedly at intervals of once every 5 weeks, and pre-administration of the cytokine inhibitor is performed 6 days, 5 days, 4 days, 3 days, 2 days, or 1 day before each administration during the step-up dosing period and the maintenance dosing period); or
[0857] 1 day, 2 days, 3 days, 4 days, 5 days, or 6 days after the administration of the anti-T cell antigen-binding molecule (when the anti-T cell antigen-binding molecule is administered repeatedly at intervals of once every 5 weeks, and pre-administration of the cytokine inhibitor is performed on the same day as each administration during the step-up dosing period and the maintenance dosing period).

### When Pre-Administration of a Cytokine Inhibitor is Performed for Each (Every) Anti-T Cell Antigen-Binding Molecule Administration During the Step-Up Dosing Period

### (Repeated Administration of the Anti-T Cell Antigen-Binding Molecule at Intervals of Once Every Week)

[0858] In one embodiment, in the combination therapy of the present disclosure, (i) a step-up dosing period and a subsequent maintenance dosing period are comprised for an anti-T cell antigen-binding molecule, (ii) the anti-T cell antigen-binding molecule is administered repeatedly at intervals of once every week during the step-up dosing period and the maintenance dosing period, and (iii) (a) pre-administration of a cytokine inhibitor is performed for each administration during the step-up dosing period, and (b) pre-administration of the cytokine inhibitor is not performed during the maintenance dosing period. As specific examples, in the combination therapy of the present disclosure, (i) a step-up dosing period and a subsequent maintenance dosing period are comprised for an anti-T cell antigen-binding molecule, (ii) the anti-T cell antigen-binding molecule is administered repeatedly at intervals of once every week during the step-up dosing period and the maintenance dosing period, and (iii) pre-administration of a cytokine inhibitor is performed according to the following embodiment:
[0859] the cytokine inhibitor is administered before administration of the anti-T cell antigen-binding molecule, which is 6 days before each administration during the step-up dosing period;
[0860] the cytokine inhibitor is administered before administration of the anti-T cell antigen-binding molecule, which is 5 days before each administration during the step-up dosing period;
[0861] the cytokine inhibitor is administered before administration of the anti-T cell antigen-binding molecule, which is 4 days before each administration during the step-up dosing period;
[0862] the cytokine inhibitor is administered before administration of the anti-T cell antigen-binding molecule, which is 3 days before each administration during the step-up dosing period;
[0863] the cytokine inhibitor is administered before administration of the anti-T cell antigen-binding molecule, which is 2 days before each administration during the step-up dosing period;
[0864] the cytokine inhibitor is administered before administration of the anti-T cell antigen-binding molecule, which is 1 day before each administration during the step-up dosing period;
[0865] the cytokine inhibitor is administered before administration of the anti-T cell antigen-binding molecule, on the same day as each administration during the step-up dosing period; or
[0866] the cytokine inhibitor is administered simultaneously with administration of the anti-T cell antigen-binding molecule, on the same day as each administration during the step-up dosing period.

[0867] In a further embodiment, in the combination therapy of the present disclosure, in addition to pre-administration of a cytokine inhibitor according to the above embodiment, the cytokine inhibitor may be further administered to an individual on the same day as, or 1 day, 2 days, 3 days, 4 days, 5 days, or 6 days after the administration of the anti-T cell antigen-binding molecule. As specific examples, the cytokine inhibitor may be further administered as follows:
[0868] on the same day as each administration during the step-up dosing period (when the anti-T cell antigen-binding molecule is administered repeatedly at intervals of once every week, and the cytokine inhibitor is pre-administered 6 days before said each administration during the step-up dosing period);
[0869] on the same day as or 1 day after each administration during the step-up dosing period (when the anti-T cell antigen-binding molecule is administered repeatedly at intervals of once every week, and pre-administration of the cytokine inhibitor is performed 5 days before said each administration during the step-up dosing period);
[0870] on the same day as, or 1 day or 2 days after each administration during the step-up dosing period (when the anti-T cell antigen-binding molecule is administered repeatedly at intervals of once every week, and pre-administration of the cytokine inhibitor is performed 4 days before said each administration during the step-up dosing period);
[0871] on the same day as, or 1 day, 2 days, or 3 days after each administration during the step-up dosing period (when the anti-T cell antigen-binding molecule is administered repeatedly at intervals of once every week, and pre-administration of the cytokine inhibitor is performed 3 days before said each administration during the step-up dosing period);
[0872] on the same day as, or 1 day, 2 days, 3 days, or 4 days after each administration during the step-up dosing period (when the anti-T cell antigen-binding molecule is administered repeatedly at intervals of once every week, and pre-administration of the cytokine inhibitor is performed 2 days before said each administration during the step-up dosing period);
[0873] on the same day as, or 1 day, 2 days, 3 days, 4 days, or 5 days after each administration during the step-up dosing period (when the anti-T cell antigen-binding molecule is administered repeatedly at intervals of once every week, and pre-administration of the cytokine inhibitor is performed 1 day before said each administration during the step-up dosing period); or
[0874] 1 day, 2 days, 3 days, 4 days, 5 days, or 6 days after each administration during the step-up dosing period (when the anti-T cell antigen-binding molecule is administered repeatedly at intervals of once every week, and pre-administration of the cytokine inhibitor is performed on the same day as said each administration during the step-up dosing period).

### (Repeated Administration of the Anti-T Cell Antigen-Binding Molecule at Intervals of Once Every 2 Weeks)

[0875] In one embodiment, in the combination therapy of the present disclosure, (i) a step-up dosing period and a subsequent maintenance dosing period are comprised for an anti-T cell antigen-binding molecule, (ii) the anti-T cell antigen-binding molecule is administered repeatedly at intervals of once every 2 weeks during the step-up dosing period and the maintenance dosing period, and (iii) (a) pre-administration of a cytokine inhibitor is performed for each administration during the step-up dosing period, and (b) pre-administration of the cytokine inhibitor is not performed during the maintenance dosing period. As specific examples, in the combination therapy of the present disclosure, (i) a step-up dosing period and a subsequent maintenance dosing period are comprised for an anti-T cell antigen-binding molecule, (ii) the anti-T cell antigen-binding molecule is administered repeatedly at intervals of once every 2 weeks during the step-up dosing period and the maintenance dosing period, and (iii) pre-administration of a cytokine inhibitor is performed according to the following embodiment:
[0876] the cytokine inhibitor is administered before administration of the anti-T cell antigen-binding molecule, which is 6 days before each administration during the step-up dosing period;
[0877] the cytokine inhibitor is administered before administration of the anti-T cell antigen-binding molecule, which is 5 days before each administration during the step-up dosing period;
[0878] the cytokine inhibitor is administered before administration of the anti-T cell antigen-binding molecule, which is 4 days before each administration during the step-up dosing period;
[0879] the cytokine inhibitor is administered before administration of the anti-T cell antigen-binding molecule, which is 3 days before each administration during the step-up dosing period;
[0880] the cytokine inhibitor is administered before administration of the anti-T cell antigen-binding molecule, which is 2 days before each administration during the step-up dosing period;
[0881] the cytokine inhibitor is administered before administration of the anti-T cell antigen-binding molecule, which is 1 day before each administration during the step-up dosing period;
[0882] the cytokine inhibitor is administered before administration of the anti-T cell antigen-binding molecule, on the same day as each administration during the step-up dosing period; or
[0883] the cytokine inhibitor is administered simultaneously with administration of the anti-T cell antigen-binding molecule, on the same day as each administration during the step-up dosing period.

[0884] In a further embodiment, in the combination therapy of the present disclosure, in addition to pre-administration of a cytokine inhibitor according to the above embodiment, the cytokine inhibitor may be further administered to an individual on the same day as, or 1 day, 2 days, 3 days, 4 days, 5 days, or 6 days after the administration of the anti-T cell antigen-binding molecule. As specific examples, the cytokine inhibitor may be further administered as follows:
[0885] on the same day as, or 1 day, 2 days, 3 days, 4 days, 5 days, or 6 days after each administration during the step-up dosing period (when the anti-T cell antigen-binding molecule is administered repeatedly at intervals of once every 2 weeks, and pre-administration of the cytokine inhibitor is performed 6 days, 5 days, 4 days, 3 days, 2 days, or 1 day before said each administration during the step-up dosing period); or
[0886] 1 day, 2 days, 3 days, 4 days, 5 days, or 6 days after each administration during the step-up dosing period (when the anti-T cell antigen-binding molecule is administered repeatedly at intervals of once every 2 weeks, and pre-administration of the cytokine inhibitor is performed on the same day as said each administration during the step-up dosing period).

### (Repeated Administration of the Anti-T Cell Antigen-Binding Molecule at Intervals of Once Every 3 Weeks)

[0887] In one embodiment, in the combination therapy of the present disclosure, (i) a step-up dosing period and a subsequent maintenance dosing period are comprised for an anti-T cell antigen-binding molecule, (ii) the anti-T cell antigen-binding molecule is administered repeatedly at intervals of once every 3 weeks during the step-up dosing period and the maintenance dosing period, and (iii) (a) pre-administration of a cytokine inhibitor is performed for each administration during the step-up dosing period, and (b) pre-administration of the cytokine inhibitor is not performed during the maintenance dosing period. As specific examples, in the combination therapy of the present disclosure, (i) a step-up dosing period and a subsequent maintenance dosing period are comprised for an anti-T cell antigen-binding molecule, (ii) the anti-T cell antigen-binding molecule is administered repeatedly at intervals of once every 3 weeks during the step-up dosing period and the maintenance dosing period, and (iii) pre-administration of a cytokine inhibitor is performed according to the following embodiment:
[0888] the cytokine inhibitor is administered before administration of the anti-T cell antigen-binding molecule, which is 6 days before each administration during the step-up dosing period;
[0889] the cytokine inhibitor is administered before administration of the anti-T cell antigen-binding molecule, which is 5 days before each administration during the step-up dosing period;
[0890] the cytokine inhibitor is administered before administration of the anti-T cell antigen-binding molecule, which is 4 days before each administration during the step-up dosing period;
[0891] the cytokine inhibitor is administered before administration of the anti-T cell antigen-binding molecule, which is 3 days before each administration during the step-up dosing period;
[0892] the cytokine inhibitor is administered before administration of the anti-T cell antigen-binding molecule, which is 2 days before each administration during the step-up dosing period;
[0893] the cytokine inhibitor is administered before administration of the anti-T cell antigen-binding molecule, which is 1 day before each administration during the step-up dosing period;
[0894] the cytokine inhibitor is administered before administration of the anti-T cell antigen-binding molecule, on the same day as each administration during the step-up dosing period; or
[0895] the cytokine inhibitor is administered simultaneously with administration of the anti-T cell antigen-binding molecule, on the same day as each administration during the step-up dosing period.

[0896] In a further embodiment, in the combination therapy of the present disclosure, in addition to pre-administration of a cytokine inhibitor according to the above embodiment, the cytokine inhibitor may be further administered to an individual on the same day as, or 1 day, 2 days, 3 days, 4 days, 5 days, or 6 days after the administration of the anti-T cell antigen-binding molecule. As specific examples, the cytokine inhibitor may be further administered as follows:
[0897] on the same day as, or 1 day, 2 days, 3 days, 4 days, 5 days, or 6 days after each administration during the step-up dosing period (when the anti-T cell antigen-binding molecule is administered repeatedly at intervals of once every 3 weeks, and pre-administration of the cytokine inhibitor is performed 6 days, 5 days, 4 days, 3 days, 2 days, or 1 day before said each administration during the step-up dosing period); or
[0898] 1 day, 2 days, 3 days, 4 days, 5 days, or 6 days after each administration during the step-up dosing period (when the anti-T cell antigen-binding molecule is administered repeatedly at intervals of once every 3 weeks, and pre-administration of the cytokine inhibitor is performed on the same day as said each administration during the step-up dosing period).

### (Repeated Administration of the Anti-T Cell Antigen-Binding Molecule at Intervals of Once Every 4 Weeks)

[0899] In one embodiment, in the combination therapy of the present disclosure, (i) a step-up dosing period and a subsequent maintenance dosing period are comprised for an anti-T cell antigen-binding molecule, (ii) the anti-T cell antigen-binding molecule is administered repeatedly at intervals of once every 4 weeks during the step-up dosing period and the maintenance dosing period, and (iii) (a) pre-administration of a cytokine inhibitor is performed for each administration during the step-up dosing period, and (b) pre-administration of the cytokine inhibitor is not performed during the maintenance dosing period. As specific examples, in the combination therapy of the present disclosure, (i) a step-up dosing period and a subsequent maintenance dosing period are comprised for an anti-T cell antigen-binding molecule, (ii) the anti-T cell antigen-binding molecule is administered repeatedly at intervals of once every 4 weeks during the step-up dosing period and the maintenance dosing period, and (iii) pre-administration of a cytokine inhibitor is performed according to the following embodiment:
[0900] the cytokine inhibitor is administered before administration of the anti-T cell antigen-binding molecule, which is 6 days before each administration during the step-up dosing period;
[0901] the cytokine inhibitor is administered before administration of the anti-T cell antigen-binding molecule, which is 5 days before each administration during the step-up dosing period;
[0902] the cytokine inhibitor is administered before administration of the anti-T cell antigen-binding molecule, which is 4 days before each administration during the step-up dosing period;
[0903] the cytokine inhibitor is administered before administration of the anti-T cell antigen-binding molecule, which is 3 days before each administration during the step-up dosing period;
[0904] the cytokine inhibitor is administered before administration of the anti-T cell antigen-binding molecule, which is 2 days before each administration during the step-up dosing period;
[0905] the cytokine inhibitor is administered before administration of the anti-T cell antigen-binding molecule, which is 1 day before each administration during the step-up dosing period;
[0906] the cytokine inhibitor is administered before administration of the anti-T cell antigen-binding molecule, on the same day as each administration during the step-up dosing period; or
[0907] the cytokine inhibitor is administered simultaneously with administration of the anti-T cell antigen-binding molecule, on the same day as each administration during the step-up dosing period.

[0908] In a further embodiment, in the combination therapy of the present disclosure, in addition to pre-administration of a cytokine inhibitor according to the above embodiment, the cytokine inhibitor may be further administered to an individual on the same day as, or 1 day, 2 days, 3 days, 4 days, 5 days, or 6 days after the administration of the anti-T cell antigen-binding molecule. As specific examples, the cytokine inhibitor may be further administered as follows:
[0909] on the same day as, or 1 day, 2 days, 3 days, 4 days, 5 days, or 6 days after each administration during the step-up dosing period (when the anti-T cell antigen-binding molecule is administered repeatedly at intervals of once every 4 weeks, and pre-administration of the cytokine inhibitor is performed 6 days, 5 days, 4 days, 3 days, 2 days, or 1 day before said each administration during the step-up dosing period); or
[0910] 1 day, 2 days, 3 days, 4 days, 5 days, or 6 days after each administration during the step-up dosing period (when the anti-T cell antigen-binding molecule is administered repeatedly at intervals of once every 4 weeks, and pre-administration of the cytokine inhibitor is performed on the same day as said each administration during the step-up dosing period).

### (Repeated Administration of the Anti-T Cell Antigen-Binding Molecule at Intervals of Once Every 5 Weeks)

[0911] In one embodiment, in the combination therapy of the present disclosure, (i) a step-up dosing period and a subsequent maintenance dosing period are comprised for an anti-T cell antigen-binding molecule, (ii) the anti-T cell antigen-binding molecule is administered repeatedly at intervals of once every 5 weeks during the step-up dosing period and the maintenance dosing period, and (iii) (a) pre-administration of a cytokine inhibitor is performed for each administration during the step-up dosing period, and (b) pre-administration of the cytokine inhibitor is not performed during the maintenance dosing period. As specific examples, in the combination therapy of the present disclosure, (i) a step-up dosing period and a subsequent maintenance dosing period are comprised for an anti-T cell antigen-binding molecule, (ii) the anti-T cell antigen-binding molecule is administered repeatedly at intervals of once every 5 weeks during the step-up dosing period and the maintenance dosing period, and (iii) pre-administration of a cytokine inhibitor is performed according to the following embodiment:
[0912] the cytokine inhibitor is administered before administration of the anti-T cell antigen-binding molecule, which is 6 days before each administration during the step-up dosing period;
[0913] the cytokine inhibitor is administered before administration of the anti-T cell antigen-binding molecule, which is 5 days before each administration during the step-up dosing period;
[0914] the cytokine inhibitor is administered before administration of the anti-T cell antigen-binding molecule, which is 4 days before each administration during the step-up dosing period;
[0915] the cytokine inhibitor is administered before administration of the anti-T cell antigen-binding molecule, which is 3 days before each administration during the step-up dosing period;
[0916] the cytokine inhibitor is administered before administration of the anti-T cell antigen-binding molecule, which is 2 days before each administration during the step-up dosing period;
[0917] the cytokine inhibitor is administered before administration of the anti-T cell antigen-binding molecule, which is 1 day before each administration during the step-up dosing period;
[0918] the cytokine inhibitor is administered before administration of the anti-T cell antigen-binding molecule, on the same day as each administration during the step-up dosing period; or
[0919] the cytokine inhibitor is administered simultaneously with administration of the anti-T cell antigen-binding molecule, on the same day as each administration during the step-up dosing period.

[0920] In a further embodiment, in the combination therapy of the present disclosure, in addition to pre-administration of a cytokine inhibitor according to the above embodiment, the cytokine inhibitor may be further administered to an individual on the same day as, or 1 day, 2 days, 3 days, 4 days, 5 days, or 6 days after the administration of the anti-T cell antigen-binding molecule. As specific examples, the cytokine inhibitor may be further administered as follows:
[0921] on the same day as, or 1 day, 2 days, 3 days, 4 days, 5 days, or 6 days after each administration during the step-up dosing period (when the anti-T cell antigen-binding molecule is administered repeatedly at intervals of once every 5 weeks, and pre-administration of the cytokine inhibitor is performed 6 days, 5 days, 4 days, 3 days, 2 days, or 1 day before said each administration during the step-up dosing period); or
[0922] 1 day, 2 days, 3 days, 4 days, 5 days, or 6 days after each administration during the step-up dosing period (when the anti-T cell antigen-binding molecule is administered repeatedly at intervals of once every 5 weeks, and pre-administration of the cytokine inhibitor is performed on the same day as said each administration during the step-up dosing period).
   When Pre-Administration of a Cytokine Inhibitor is Performed for Administration of an Anti-T Cell Antigen-Binding Molecule for Each (Every) Administration During the Step-Up Dosing Period, and for the First or Multiple Administrations During the Maintenance Dosing Period

### (Repeated Administration of the Anti-T Cell Antigen-Binding Molecule at Intervals of Once Every Week)

[0923] In one embodiment, in the combination therapy of the present disclosure, (i) a step-up dosing period and a subsequent maintenance dosing period are comprised for an anti-T cell antigen-binding molecule, (ii) the anti-T cell antigen-binding molecule is administered repeatedly at intervals of once every week during the step-up dosing period and the maintenance dosing period, and (iii) pre-administration of a cytokine inhibitor is performed (a) for each administration during the step-up dosing period, and (b) for the first administration or the first to second, the first to third, the first to fourth, or the first to fifth administrations during the maintenance dosing period. As specific examples, in the combination therapy of the present disclosure, (i) a step-up dosing period and a subsequent maintenance dosing period are comprised for an anti-T cell antigen-binding molecule, (ii) the anti-T cell antigen-binding molecule is administered repeatedly at intervals of once every week during the step-up dosing period and the maintenance dosing period, and (iii) pre-administration of a cytokine inhibitor is performed according to the following embodiment:
[0924] the cytokine inhibitor is administered before administration of the anti-T cell antigen-binding molecule, which is (a) 6 days before each administration during the step-up dosing period, and (b) 6 days before the first administration or each of the first to second, the first to third, the first to fourth, or the first to fifth administrations during the maintenance dosing period;
[0925] the cytokine inhibitor is administered before administration of the anti-T cell antigen-binding molecule, which is (a) 5 days before each administration during the step-up dosing period, and (b) 5 days before the first administration or each of the first to second, the first to third, the first to fourth, or the first to fifth administrations during the maintenance dosing period;
[0926] the cytokine inhibitor is administered before administration of the anti-T cell antigen-binding molecule, which is (a) 4 days before each administration during the step-up dosing period, and (b) 4 days before the first administration or each of the first to second, the first to third, the first to fourth, or the first to fifth administrations during the maintenance dosing period;
[0927] the cytokine inhibitor is administered before administration of the anti-T cell antigen-binding molecule, which is (a) 3 days before each administration during the step-up dosing period, and (b) 3 days before the first administration or each of the first to second, the first to third, the first to fourth, or the first to fifth administrations during the maintenance dosing period;
[0928] the cytokine inhibitor is administered before administration of the anti-T cell antigen-binding molecule, which is (a) 2 days before each administration during the step-up dosing period, and (b) 2 days before the first administration or each of the first to second, the first to third, the first to fourth, or the first to fifth administrations during the maintenance dosing period;
[0929] the cytokine inhibitor is administered before administration of the anti-T cell antigen-binding molecule, which is (a) 1 day before each administration during the step-up dosing period, and (b) 1 day before the first administration or each of the first to second, the first to third, the first to fourth, or the first to fifth administrations during the maintenance dosing period;
[0930] the cytokine inhibitor is administered before administration of the anti-T cell antigen-binding molecule (a) on the same day as each administration during the step-up dosing period, and (b) on the same day as the first administration or each of the first to second, the first to third, the first to fourth, or the first to fifth administrations during the maintenance dosing period; or
[0931] the cytokine inhibitor is administered simultaneously with administration of the anti-T cell antigen-binding molecule (a) on the same day as each administration during the step-up dosing period, and (b) on the same day as the first administration or each of the first to second, the first to third, the first to fourth, or the first to fifth administrations during the maintenance dosing period.

[0932] In a further embodiment, in the combination therapy of the present disclosure, in addition to pre-administration of a cytokine inhibitor according to the above embodiment, the cytokine inhibitor may be further administered to an individual on the same day as, or 1 day, 2 days, 3 days, 4 days, 5 days, or 6 days after the administration of the anti-T cell antigen-binding molecule. As specific examples, the cytokine inhibitor may be further administered as follows:
[0933] (a) on the same day as each administration during the step-up dosing period, and (b) on the same day as the first administration or each of the first to second, the first to third, the first to fourth, or the first to fifth administrations during the maintenance dosing period (when the anti-T cell antigen-binding molecule is administered repeatedly at intervals of once every week, and pre-administration of the cytokine inhibitor is performed (a) 6 days before said each administration during the step-up dosing period and (b) 6 days before the said first administration or each of the first to second, the first to third, the first to fourth, or the first to fifth administrations during the maintenance dosing period);
[0934] (a) on the same day as or 1 day after each administration during the step-up dosing period, and (b) on the same day as or 1 day after the first administration or each of the first to second, the first to third, the first to fourth, or the first to fifth administrations during the maintenance dosing period (when the anti-T cell antigen-binding molecule is administered repeatedly at intervals of once every week, and pre-administration of the cytokine inhibitor is performed (a) 5 days before said each administration during the step-up dosing period and (b) 5 days before the said first administration or each of the first to second, the first to third, the first to fourth, or the first to fifth administrations during the maintenance dosing period);
[0935] (a) on the same day as, or 1 day or 2 days after each administration during the step-up dosing period, and (b) on the same day as, or 1 day or 2 days after the first administration or each of the first to second, the first to third, the first to fourth, or the first to fifth administrations during the maintenance dosing period (when the anti-T cell antigen-binding molecule is administered repeatedly at intervals of once every week, and pre-administration of the cytokine inhibitor is performed (a) 4 days before said each administration during the step-up dosing period and (b) 4 days before the said first administration or each of the first to second, the first to third, the first to fourth, or the first to fifth administrations during the maintenance dosing period);
[0936] (a) on the same day as, or 1 day, 2 days, or 3 days after each administration during the step-up dosing period, and (b) on the same day as, or 1 day, 2 days, or 3 days after the first administration or each of the first to second, the first to third, the first to fourth, or the first to fifth administrations during the maintenance dosing period (when the anti-T cell antigen-binding molecule is administered repeatedly at intervals of once every week, and pre-administration of the cytokine inhibitor is performed (a) 3 days before said each administration during the step-up dosing period and (b) 3 days before the said first administration or each of the first to second, the first to third, the first to fourth, or the first to fifth administrations during the maintenance dosing period);
[0937] (a) on the same day as, or 1 day, 2 days, 3 days, or 4 days after each administration during the step-up dosing period, and (b) on the same day as, or 1 day, 2 days, 3 days, or 4 days after the first administration or each of the first to second, the first to third, the first to fourth, or the first to fifth administrations during the maintenance dosing period (when the anti-T cell antigen-binding molecule is administered repeatedly at intervals of once every week, and pre-administration of the cytokine inhibitor is performed (a) 2 days before said each administration during the step-up dosing period and (b) 2 days before the said first administration or each of the first to second, the first to third, the first to fourth, or the first to fifth administrations during the maintenance dosing period);
[0938] (a) on the same day as, or 1 day, 2 days, 3 days, 4 days, or 5 days after each administration during the step-up dosing period, and (b) on the same day as, or 1 day, 2 days, 3 days, 4 days, or 5 days after the first administration or each of the first to second, the first to third, the first to fourth, or the first to fifth administrations during the maintenance dosing period (when the anti-T cell antigen-binding molecule is administered repeatedly at intervals of once every week, and pre-administration of the cytokine inhibitor is performed (a) 1 day before said each administration during the step-up dosing period and (b) 1 day before the said first administration or each of the first to second, the first to third, the first to fourth, or the first to fifth administrations during the maintenance dosing period); or
[0939] (a) 1 day, 2 days, 3 days, 4 days, 5 days, or 6 days after each administration during the step-up dosing period, and (b) 1 day, 2 days, 3 days, 4 days, 5 days, or 6 days after the first administration or each administration of the first to second, the first to third, the first to fourth, or the first to fifth administrations during the maintenance dosing period (when the anti-T cell antigen-binding molecule is administered repeatedly at intervals of once every week, and pre-administration of the cytokine inhibitor is performed (a) on the same day as said each administration during the step-up dosing period and (b) on the same day as the said first administration or each of the first to second, the first to third, the first to fourth, or the first to fifth administrations during the maintenance dosing period).

### (Repeated Administration of the Anti-T Cell Antigen-Binding Molecule at Intervals of Once Every 2 Weeks)

[0940] In one embodiment, in the combination therapy of the present disclosure, (i) a step-up dosing period and a subsequent maintenance dosing period are comprised for an anti-T cell antigen-binding molecule, (ii) the anti-T cell antigen-binding molecule is administered repeatedly at intervals of once every 2 weeks during the step-up dosing period and the maintenance dosing period, and (iii) pre-administration of a cytokine inhibitor is performed (a) for each administration during the step-up dosing period, and (b) for the first administration or the first to second, the first to third, the first to fourth, or the first to fifth administrations during the maintenance dosing period. As specific examples, in the combination therapy of the present disclosure, (i) a step-up dosing period and a subsequent maintenance dosing period are comprised for an anti-T cell antigen-binding molecule, (ii) the anti-T cell antigen-binding molecule is administered repeatedly at intervals of once every 2 weeks during the step-up dosing period and the maintenance dosing period, and (iii) pre-administration of a cytokine inhibitor is performed according to the following embodiment:
[0941] the cytokine inhibitor is administered before administration of the anti-T cell antigen-binding molecule, which is (a) 6 days before each administration during the step-up dosing period, and (b) 6 days before the first administration or each of the first to second, the first to third, the first to fourth, or the first to fifth administrations during the maintenance dosing period;
[0942] the cytokine inhibitor is administered before administration of the anti-T cell antigen-binding molecule, which is (a) 5 days before each administration during the step-up dosing period, and (b) 5 days before the first administration or each of the first to second, the first to third, the first to fourth, or the first to fifth administrations during the maintenance dosing period;
[0943] the cytokine inhibitor is administered before administration of the anti-T cell antigen-binding molecule, which is (a) 4 days before each administration during the step-up dosing period, and (b) 4 days before the first administration or each of the first to second, the first to third, the first to fourth, or the first to fifth administrations during the maintenance dosing period;
[0944] the cytokine inhibitor is administered before administration of the anti-T cell antigen-binding molecule, which is (a) 3 days before each administration during the step-up dosing period, and (b) 3 days before the first administration or each of the first to second, the first to third, the first to fourth, or the first to fifth administrations during the maintenance dosing period;
[0945] the cytokine inhibitor is administered before administration of the anti-T cell antigen-binding molecule, which is (a) 2 days before each administration during the step-up dosing period, and (b) 2 days before the first administration or each of the first to second, the first to third, the first to fourth, or the first to fifth administrations during the maintenance dosing period;
[0946] the cytokine inhibitor is administered before administration of the anti-T cell antigen-binding molecule, which is (a) 1 day before each administration during the step-up dosing period, and (b) 1 day before the first administration or each of the first to second, the first to third, the first to fourth, or the first to fifth administrations during the maintenance dosing period;
[0947] the cytokine inhibitor is administered before administration of the anti-T cell antigen-binding molecule (a) on the same day as each administration during the step-up dosing period, and (b) on the same day as the first administration or each of the first to second, the first to third, the first to fourth, or the first to fifth administrations during the maintenance dosing period; or
[0948] the cytokine inhibitor is administered simultaneously with administration of the anti-T cell antigen-binding molecule (a) on the same day as each administration during the step-up dosing period, and (b) on the same day as the first administration or each of the first to second, the first to third, the first to fourth, or the first to fifth administrations during the maintenance dosing period.

[0949] In a further embodiment, in the combination therapy of the present disclosure, in addition to pre-administration of a cytokine inhibitor according to the above embodiment, the cytokine inhibitor may be further administered to an individual on the same day as, or 1 day, 2 days, 3 days, 4 days, 5 days, or 6 days after the administration of the anti-T cell antigen-binding molecule. As specific examples, the cytokine inhibitor may be further administered as follows:
[0950] (a) on the same day as, or 1 day, 2 days, 3 days, 4 days, 5 days, or 6 days after each administration during the step-up dosing period, and (b) on the same day as, or 1 day, 2 days, 3 days, 4 days, 5 days, or 6 days after the first administration or each of the first to second, the first to third, the first to fourth, or the first to fifth administrations during the maintenance dosing period (when the anti-T cell antigen-binding molecule is administered repeatedly at intervals of once every 2 weeks, and pre-administration of the cytokine inhibitor is performed (a) 6 days, 5 days, 4 days, 3 days, 2 days, or 1 day before said each administration during the step-up dosing period and (b) 6 days, 5 days, 4 days, 3 days, 2 days, or 1 day before the said first administration or each of the first to second, the first to third, the first to fourth, or the first to fifth administrations during the maintenance dosing period); or
[0951] (a) 1 day, 2 days, 3 days, 4 days, 5 days, or 6 days after each administration during the step-up dosing period, and (b) 1 day, 2 days, 3 days, 4 days, 5 days, or 6 days after the first administration or each of the first to second, the first to third, the first to fourth, or the first to fifth administrations during the maintenance dosing period (when the anti-T cell antigen-binding molecule is administered repeatedly at intervals of once every 2 weeks, and pre-administration of the cytokine inhibitor is performed (a) on the same day as said each administration during the step-up dosing period and (b) on the same day as the said first administration or each of the first to second, the first to third, the first to fourth, or the first to fifth administrations during the maintenance dosing period).

### (Repeated Administration of the Anti-T Cell Antigen-Binding Molecule at Intervals of Once Every 3 Weeks)

[0952] In one embodiment, in the combination therapy of the present disclosure, (i) a step-up dosing period and a subsequent maintenance dosing period are comprised for an anti-T cell antigen-binding molecule, (ii) the anti-T cell antigen-binding molecule is administered repeatedly at intervals of once every 3 weeks during the step-up dosing period and the maintenance dosing period, and (iii) pre-administration of a cytokine inhibitor is performed (a) for each administration during the step-up dosing period, and (b) for the first administration or the first to second, the first to third, the first to fourth, or the first to fifth administrations during the maintenance dosing period. As specific examples, in the combination therapy of the present disclosure, (i) a step-up dosing period and a subsequent maintenance dosing period are comprised for an anti-T cell antigen-binding molecule, (ii) the anti-T cell antigen-binding molecule is administered repeatedly at intervals of once every 3 weeks during the step-up dosing period and the maintenance dosing period, and (iii) pre-administration of a cytokine inhibitor is performed according to the following embodiment:
[0953] the cytokine inhibitor is administered before administration of the anti-T cell antigen-binding molecule, which is (a) 6 days before each administration during the step-up dosing period, and (b) 6 days before the first administration or each of the first to second, the first to third, the first to fourth, or the first to fifth administrations during the maintenance dosing period;
[0954] the cytokine inhibitor is administered before administration of the anti-T cell antigen-binding molecule, which is (a) 5 days before each administration during the step-up dosing period, and (b) 5 days before the first administration or each of the first to second, the first to third, the first to fourth, or the first to fifth administrations during the maintenance dosing period;
[0955] the cytokine inhibitor is administered before administration of the anti-T cell antigen-binding molecule, which is (a) 4 days before each administration during the step-up dosing period, and (b) 4 days before the first administration or each of the first to second, the first to third, the first to fourth, or the first to fifth administrations during the maintenance dosing period;
[0956] the cytokine inhibitor is administered before administration of the anti-T cell antigen-binding molecule, which is (a) 3 days before each administration during the step-up dosing period, and (b) 3 days before the first administration or each of the first to second, the first to third, the first to fourth, or the first to fifth administrations during the maintenance dosing period;
[0957] the cytokine inhibitor is administered before administration of the anti-T cell antigen-binding molecule, which is (a) 2 days before each administration during the step-up dosing period, and (b) 2 days before the first administration or each of the first to second, the first to third, the first to fourth, or the first to fifth administrations during the maintenance dosing period;
[0958] the cytokine inhibitor is administered before administration of the anti-T cell antigen-binding molecule, which is (a) 1 day before each administration during the step-up dosing period, and (b) 1 day before the first administration or each of the first to second, the first to third, the first to fourth, or the first to fifth administrations during the maintenance dosing period;
[0959] the cytokine inhibitor is administered before administration of the anti-T cell antigen-binding molecule (a) on the same day as each administration during the step-up dosing period, and (b) on the same day as the first administration or each of the first to second, the first to third, the first to fourth, or the first to fifth administrations during the maintenance dosing period; or
[0960] the cytokine inhibitor is administered simultaneously with administration of the anti-T cell antigen-binding molecule (a) on the same day as each administration during the step-up dosing period, and (b) on the same day as the first administration or each of the first to second, the first to third, the first to fourth, or the first to fifth administrations during the maintenance dosing period.

[0961] In a further embodiment, in the combination therapy of the present disclosure, in addition to pre-administration of a cytokine inhibitor according to the above embodiment, the cytokine inhibitor may be further administered to an individual on the same day as, or 1 day, 2 days, 3 days, 4 days, 5 days, or 6 days after the administration of the anti-T cell antigen-binding molecule. As specific examples, the cytokine inhibitor may be further administered as follows:
[0962] (a) on the same day as, or 1 day, 2 days, 3 days, 4 days, 5 days, or 6 days after each administration during the step-up dosing period, and (b) on the same day as, or 1 day, 2 days, 3 days, 4 days, 5 days, or 6 days after the first administration or each of the first to second, the first to third, the first to fourth, or the first to fifth administrations during the maintenance dosing period (when the anti-T cell antigen-binding molecule is administered repeatedly at intervals of once every 3 weeks, and pre-administration of the cytokine inhibitor is performed (a) 6 days, 5 days, 4 days, 3 days, 2 days, or 1 day before said each administration during the step-up dosing period and (b) 6 days, 5 days, 4 days, 3 days, 2 days, or 1 day before the said first administration or each of the first to second, the first to third, the first to fourth, or the first to fifth administrations during the maintenance dosing period); or
[0963] (a) 1 day, 2 days, 3 days, 4 days, 5 days, or 6 days after each administration during the step-up dosing period, and (b) 1 day, 2 days, 3 days, 4 days, 5 days, or 6 days after the first administration or each of the first to second, the first to third, the first to fourth, or the first to fifth administrations during the maintenance dosing period (when the anti-T cell antigen-binding molecule is administered repeatedly at intervals of once every 3 weeks, and pre-administration of the cytokine inhibitor is performed (a) on the same day as said each administration during the step-up dosing period and (b) on the same day as the said first administration or each of the first to second, the first to third, the first to fourth, or the first to fifth administrations during the maintenance dosing period).

### (Repeated Administration of the Anti-T Cell Antigen-Binding Molecule at Intervals of Once Every 4 Weeks)

[0964] In one embodiment, in the combination therapy of the present disclosure, (i) a step-up dosing period and a subsequent maintenance dosing period are comprised for an anti-T cell antigen-binding molecule, (ii) the anti-T cell antigen-binding molecule is administered repeatedly at intervals of once every 4 weeks during the step-up dosing period and the maintenance dosing period, and (iii) pre-administration of a cytokine inhibitor is performed (a) for each administration during the step-up dosing period, and (b) for the first administration or the first to second, the first to third, the first to fourth, or the first to fifth administrations during the maintenance dosing period. As specific examples, in the combination therapy of the present disclosure, (i) a step-up dosing period and a subsequent maintenance dosing period are comprised for an anti-T cell antigen-binding molecule, (ii) the anti-T cell antigen-binding molecule is administered repeatedly at intervals of once every 4 weeks during the step-up dosing period and the maintenance dosing period, and (iii) pre-administration of a cytokine inhibitor is performed according to the following embodiment:
[0965] the cytokine inhibitor is administered before administration of the anti-T cell antigen-binding molecule, which is (a) 6 days before each administration during the step-up dosing period, and (b) 6 days before the first administration or each of the first to second, the first to third, the first to fourth, or the first to fifth administrations during the maintenance dosing period;
[0966] the cytokine inhibitor is administered before administration of the anti-T cell antigen-binding molecule, which is (a) 5 days before each administration during the step-up dosing period, and (b) 5 days before the first administration or each of the first to second, the first to third, the first to fourth, or the first to fifth administrations during the maintenance dosing period;
[0967] the cytokine inhibitor is administered before administration of the anti-T cell antigen-binding molecule, which is (a) 4 days before each administration during the step-up dosing period, and (b) 4 days before the first administration or each of the first to second, the first to third, the first to fourth, or the first to fifth administrations during the maintenance dosing period;
[0968] the cytokine inhibitor is administered before administration of the anti-T cell antigen-binding molecule, which is (a) 3 days before each administration during the step-up dosing period, and (b) 3 days before the first administration or each of the first to second, the first to third, the first to fourth, or the first to fifth administrations during the maintenance dosing period;
[0969] the cytokine inhibitor is administered before administration of the anti-T cell antigen-binding molecule, which is (a) 2 days before each administration during the step-up dosing period, and (b) 2 days before the first administration or each of the first to second, the first to third, the first to fourth, or the first to fifth administrations during the maintenance dosing period;
[0970] the cytokine inhibitor is administered before administration of the anti-T cell antigen-binding molecule, which is (a) 1 day before each administration during the step-up dosing period, and (b) 1 day before the first administration or each of the first to second, the first to third, the first to fourth, or the first to fifth administrations during the maintenance dosing period;
[0971] the cytokine inhibitor is administered before administration of the anti-T cell antigen-binding molecule (a) on the same day as each administration during the step-up dosing period, and (b) on the same day as the first administration or each of the first to second, the first to third, the first to fourth, or the first to fifth administrations during the maintenance dosing period; or
[0972] the cytokine inhibitor is administered simultaneously with administration of the anti-T cell antigen-binding molecule (a) on the same day as each administration during the step-up dosing period, and (b) on the same day as the first administration or each of the first to second, the first to third, the first to fourth, or the first to fifth administrations during the maintenance dosing period.

[0973] In a further embodiment, in the combination therapy of the present disclosure, in addition to pre-administration of a cytokine inhibitor according to the above embodiment, the cytokine inhibitor may be further administered to an individual on the same day as, or 1 day, 2 days, 3 days, 4 days, 5 days, or 6 days after the administration of the anti-T cell antigen-binding molecule. As specific examples, the cytokine inhibitor may be further administered as follows:
[0974] (a) on the same day as, or 1 day, 2 days, 3 days, 4 days, 5 days, or 6 days after each administration during the step-up dosing period, and (b) on the same day as, or 1 day, 2 days, 3 days, 4 days, 5 days, or 6 days after the first administration or each of the first to second, the first to third, the first to fourth, or the first to fifth administrations during the maintenance dosing period (when the anti-T cell antigen-binding molecule is administered repeatedly at intervals of once every 4 weeks, and pre-administration of the cytokine inhibitor is performed (a) 6 days, 5 days, 4 days, 3 days, 2 days, or 1 day before said each administration during the step-up dosing period and (b) 6 days, 5 days, 4 days, 3 days, 2 days, or 1 day before the said first administration or each of the first to second, the first to third, the first to fourth, or the first to fifth administrations during the maintenance dosing period); or
[0975] (a) 1 day, 2 days, 3 days, 4 days, 5 days, or 6 days after each administration during the step-up dosing period, and (b) 1 day, 2 days, 3 days, 4 days, 5 days, or 6 days after the first administration or each of the first to second, the first to third, the first to fourth, or the first to fifth administrations during the maintenance dosing period (when the anti-T cell antigen-binding molecule is administered repeatedly at intervals of once every 4 weeks, and pre-administration of the cytokine inhibitor is performed (a) on the same day as said each administration during the step-up dosing period and (b) on the same day as the said first administration or each of the first to second, the first to third, the first to fourth, or the first to fifth administrations during the maintenance dosing period).

### (Repeated Administration of the Anti-T Cell Antigen-Binding Molecule at Intervals of Once Every 5 Weeks)

[0976] In one embodiment, in the combination therapy of the present disclosure, (i) a step-up dosing period and a subsequent maintenance dosing period are comprised for an anti-T cell antigen-binding molecule, (ii) the anti-T cell antigen-binding molecule is administered repeatedly at intervals of once every 5 weeks during the step-up dosing period and the maintenance dosing period, and (iii) pre-administration of a cytokine inhibitor is performed (a) for each administration during the step-up dosing period, and (b) for the first administration or the first to second, the first to third, the first to fourth, or the first to fifth administrations during the maintenance dosing period. As specific examples, in the combination therapy of the present disclosure, (i) a step-up dosing period and a subsequent maintenance dosing period are comprised for an anti-T cell antigen-binding molecule, (ii) the anti-T cell antigen-binding molecule is administered repeatedly at intervals of once every 5 weeks during the step-up dosing period and the maintenance dosing period, and (iii) pre-administration of a cytokine inhibitor is performed according to the following embodiment:
[0977] the cytokine inhibitor is administered before administration of the anti-T cell antigen-binding molecule, which is (a) 6 days before each administration during the step-up dosing period, and (b) 6 days before the first administration or each of the first to second, the first to third, the first to fourth, or the first to fifth administrations during the maintenance dosing period;
[0978] the cytokine inhibitor is administered before administration of the anti-T cell antigen-binding molecule, which is (a) 5 days before each administration during the step-up dosing period, and (b) 5 days before the first administration or each of the first to second, the first to third, the first to fourth, or the first to fifth administrations during the maintenance dosing period;
[0979] the cytokine inhibitor is administered before administration of the anti-T cell antigen-binding molecule, which is (a) 4 days before each administration during the step-up dosing period, and (b) 4 days before the first administration or each of the first to second, the first to third, the first to fourth, or the first to fifth administrations during the maintenance dosing period;
[0980] the cytokine inhibitor is administered before administration of the anti-T cell antigen-binding molecule, which is (a) 3 days before each administration during the step-up dosing period, and (b) 3 days before the first administration or each of the first to second, the first to third, the first to fourth, or the first to fifth administrations during the maintenance dosing period;
[0981] the cytokine inhibitor is administered before administration of the anti-T cell antigen-binding molecule, which is (a) 2 days before each administration during the step-up dosing period, and (b) 2 days before the first administration or each of the first to second, the first to third, the first to fourth, or the first to fifth administrations during the maintenance dosing period;
[0982] the cytokine inhibitor is administered before administration of the anti-T cell antigen-binding molecule, which is (a) 1 day before each administration during the step-up dosing period, and (b) 1 day before the first administration or each of the first to second, the first to third, the first to fourth, or the first to fifth administrations during the maintenance dosing period;
[0983] the cytokine inhibitor is administered before administration of the anti-T cell antigen-binding molecule (a) on the same day as each administration during the step-up dosing period, and (b) on the same day as the first administration or each of the first to second, the first to third, the first to fourth, or the first to fifth administrations during the maintenance dosing period; or
[0984] the cytokine inhibitor is administered simultaneously with administration of the anti-T cell antigen-binding molecule (a) on the same day as each administration during the step-up dosing period, and (b) on the same day as the first administration or each of the first to second, the first to third, the first to fourth, or the first to fifth administrations during the maintenance dosing period.

[0985] In a further embodiment, in the combination therapy of the present disclosure, in addition to pre-administration of a cytokine inhibitor according to the above embodiment, the cytokine inhibitor may be further administered to an individual on the same day as, or 1 day, 2 days, 3 days, 4 days, 5 days, or 6 days after the administration of the anti-T cell antigen-binding molecule. As specific examples, the cytokine inhibitor may be further administered as follows:
[0986] (a) on the same day as, or 1 day, 2 days, 3 days, 4 days, 5 days, or 6 days after each administration during the step-up dosing period, and (b) on the same day as, or 1 day, 2 days, 3 days, 4 days, 5 days, or 6 days after the first administration or each of the first to second, the first to third, the first to fourth, or the first to fifth administrations during the maintenance dosing period (when the anti-T cell antigen-binding molecule is administered repeatedly at intervals of once every 5 weeks, and pre-administration of the cytokine inhibitor is performed (a) 6 days, 5 days, 4 days, 3 days, 2 days, or 1 day before said each administration during the step-up dosing period and (b) 6 days, 5 days, 4 days, 3 days, 2 days, or 1 day before the said first administration or each of the first to second, the first to third, the first to fourth, or the first to fifth administrations during the maintenance dosing period); or
[0987] (a) 1 day, 2 days, 3 days, 4 days, 5 days, or 6 days after each administration during the step-up dosing period, and (b) 1 day, 2 days, 3 days, 4 days, 5 days, or 6 days after the first administration or each of the first to second, the first to third, the first to fourth, or the first to fifth administrations during the maintenance dosing period (when the anti-T cell antigen-binding molecule is administered repeatedly at intervals of once every 5 weeks, and pre-administration of the cytokine inhibitor is performed (a) on the same day as said each administration during the step-up dosing period and (b) on the same day as the said first administration or each of the first to second, the first to third, the first to fourth, or the first to fifth administrations during the maintenance dosing period).

### When Pre-Administration of a Cytokine Inhibitor is Performed for Administration of an Anti-T Cell Antigen-Binding Molecule for Each (Every) Administration During the Step-Up Dosing Period, and for Every Dosing Cycle During the Maintenance Dosing Period

### (Repeated Administration of the Anti-T Cell Antigen-Binding Molecule at Intervals of Once Every Week)

[0988] In one embodiment, in the combination therapy of the present disclosure, (i) a step-up dosing period and a subsequent maintenance dosing period are comprised for an anti-T cell antigen-binding molecule, (ii) the anti-T cell antigen-binding molecule is administered repeatedly at intervals of once every week during the step-up dosing period, (iii) the anti-T cell antigen-binding molecule is administered repeatedly at intervals of once every week, in dosing cycles where 2, 3, 4, or 5 administrations constitute one cycle during the maintenance dosing period, and (iv) pre-administration of a cytokine inhibitor is performed (a) for each administration during the step-up dosing period, and (b) for the first administration in each of the dosing cycles during the maintenance dosing period. As specific examples, in the combination therapy of the present disclosure, (i) a step-up dosing period and a subsequent maintenance dosing period are comprised for an anti-T cell antigen-binding molecule, (ii) the anti-T cell antigen-binding molecule is administered repeatedly at intervals of once every week during the step-up dosing period, (iii) the anti-T cell antigen-binding molecule is administered repeatedly at intervals of once every week, in dosing cycles where 2, 3, 4, or 5 administrations constitute one cycle during the maintenance dosing period, and (iv) pre-administration of a cytokine inhibitor is performed according to the following embodiment:
[0989] the cytokine inhibitor is administered before administration of the anti-T cell antigen-binding molecule, which is (a) 6 days before each administration during the step-up dosing period, and (b) 6 days before the first administration in each of the dosing cycles during the maintenance dosing period;
[0990] the cytokine inhibitor is administered before administration of the anti-T cell antigen-binding molecule, which is (a) 5 days before each administration during the step-up dosing period, and (b) 5 days before the first administration in each of the dosing cycles during the maintenance dosing period;
[0991] the cytokine inhibitor is administered before administration of the anti-T cell antigen-binding molecule, which is (a) 4 days before each administration during the step-up dosing period, and (b) 4 days before the first administration in each of the dosing cycles during the maintenance dosing period;
[0992] the cytokine inhibitor is administered before administration of the anti-T cell antigen-binding molecule, which is (a) 3 days before each administration during the step-up dosing period, and (b) 3 days before the first administration in each of the dosing cycles during the maintenance dosing period;
[0993] the cytokine inhibitor is administered before administration of the anti-T cell antigen-binding molecule, which is (a) 2 days before each administration during the step-up dosing period, and (b) 2 days before the first administration in each of the dosing cycles during the maintenance dosing period;
[0994] the cytokine inhibitor is administered before administration of the anti-T cell antigen-binding molecule, which is (a) 1 day before each administration during the step-up dosing period, and (b) 1 day before the first administration in each of the dosing cycles during the maintenance dosing period;
[0995] the cytokine inhibitor is administered before administration of the anti-T cell antigen-binding molecule (a) on the same day as each administration during the step-up dosing period, and (b) on the same day as the first administration in each of the dosing cycles during the maintenance dosing period; or
[0996] the cytokine inhibitor is administered simultaneously with administration of the anti-T cell antigen-binding molecule (a) on the same day as each administration during the step-up dosing period, and (b) on the same day as the first administration in each of the dosing cycles during the maintenance dosing period.

[0997] In a further embodiment, in the combination therapy of the present disclosure, in addition to pre-administration of a cytokine inhibitor according to the above embodiment, the cytokine inhibitor may be further administered to an individual on the same day as, or 1 day, 2 days, 3 days, 4 days, 5 days, or 6 days after the administration of the anti-T cell antigen-binding molecule. As specific examples, the cytokine inhibitor may be further administered as follows:
[0998] (a) on the same day as administration during the step-up dosing period, and (b) on the same day as the first administration in each of the dosing cycles during the maintenance dosing period (when the anti-T cell antigen-binding molecule is administered repeatedly at intervals of once every week, and pre-administration of the cytokine inhibitor is performed (a) 6 days before each administration during the step-up dosing period and (b) 6 days before the said first administration in each of the dosing cycles during the maintenance dosing period);
[0999] (a) on the same day as or 1 day after administration during the step-up dosing period, and (b) on the same day as or 1 day after the first administration in each of the dosing cycles during the maintenance dosing period (when the anti-T cell antigen-binding molecule is administered repeatedly at intervals of once every week, and pre-administration of the cytokine inhibitor is performed (a) 5 days before each administration during the step-up dosing period and (b) 5 days before the said first administration in each of the dosing cycles during the maintenance dosing period);
[1000] (a) on the same day as, or 1 day or 2 days after administration during the step-up dosing period, and (b) on the same day as, or 1 day or 2 days after the first administration in each of the dosing cycles during the maintenance dosing period (when the anti-T cell antigen-binding molecule is administered repeatedly at intervals of once every week, and pre-administration of the cytokine inhibitor is performed (a) 4 days before each administration during the step-up dosing period and (b) 4 days before the said first administration in each of the dosing cycles during the maintenance dosing period);
[1001] (a) on the same day as, or 1 day, 2 days, or 3 days after administration during the step-up dosing period, and (b) on the same day as, or 1 day, 2 days, or 3 days after the first administration in each of the dosing cycles during the maintenance dosing period (when the anti-T cell antigen-binding molecule is administered repeatedly at intervals of once every week, and pre-administration of the cytokine inhibitor is performed (a) 3 days before each administration during the step-up dosing period and (b) 3 days before the said first administration in each of the dosing cycles during the maintenance dosing period);
[1002] (a) on the same day as, or 1 day, 2 days, 3 days, or 4 days after administration during the step-up dosing period, and (b) on the same day as, or 1 day, 2 days, 3 days, or 4 days after the first administration in each of the dosing cycles during the maintenance dosing period (when the anti-T cell antigen-binding molecule is administered repeatedly at intervals of once every week, and pre-administration of the cytokine inhibitor is performed (a) 2 days before each administration during the step-up dosing period and (b) 2 days before the said first administration in each of the dosing cycles during the maintenance dosing period);
[1003] (a) on the same day as, or 1 day, 2 days, 3 days, 4 days, or 5 days after administration during the step-up dosing period, and (b) on the same day as, or 1 day, 2 days, 3 days, 4 days, or 5 days after the first administration in each of the dosing cycles during the maintenance dosing period (when the anti-T cell antigen-binding molecule is administered repeatedly at intervals of once every week, and pre-administration of the cytokine inhibitor is performed (a) 1 day before each administration during the step-up dosing period and (b) 1 day before the said first administration in each of the dosing cycles during the maintenance dosing period); or
[1004] (a) 1 day, 2 days, 3 days, 4 days, 5 days, or 6 days after administration during the step-up dosing period, and (b) 1 day, 2 days, 3 days, 4 days, 5 days, or 6 days after the said first administration in each of the dosing cycles during the maintenance dosing period (when the anti-T cell antigen-binding molecule is administered repeatedly at intervals of once every week, and pre-administration of the cytokine inhibitor is performed (a) on the same day as each administration during the step-up dosing period and (b) on the same day as the said first administration in each of the dosing cycles during the maintenance dosing period).

### (Repeated Administration of the Anti-T Cell Antigen-Binding Molecule at Intervals of Once Every 2 Weeks)

[1005] In one embodiment, in the combination therapy of the present disclosure, (i) a step-up dosing period and a subsequent maintenance dosing period are comprised for an anti-T cell antigen-binding molecule, (ii) the anti-T cell antigen-binding molecule is administered repeatedly at intervals of once every 2 weeks during the step-up dosing period, (iii) the anti-T cell antigen-binding molecule is administered repeatedly at intervals of once every 2 weeks, in dosing cycles where 2, 3, 4, or 5 administrations constitute one cycle during the maintenance dosing period, and (iv) pre-administration of a cytokine inhibitor is performed (a) for each administration during the step-up dosing period, and (b) for the first administration in each of the dosing cycles during the maintenance dosing period. As specific examples, in the combination therapy of the present disclosure, (i) a step-up dosing period and a subsequent maintenance dosing period are comprised for an anti-T cell antigen-binding molecule, (ii) the anti-T cell antigen-binding molecule is administered repeatedly at intervals of once every 2 weeks during the step-up dosing period, (iii) the anti-T cell antigen-binding molecule is administered repeatedly at intervals of once every 2 weeks, in dosing cycles where 2, 3, 4, or 5 administrations constitute one cycle during the maintenance dosing period, and (iv) pre-administration of a cytokine inhibitor is performed according to the following embodiment:
[1006] the cytokine inhibitor is administered before administration of the anti-T cell antigen-binding molecule, which is (a) 6 days before each administration during the step-up dosing period, and (b) 6 days before the first administration in each of the dosing cycles during the maintenance dosing period;
[1007] the cytokine inhibitor is administered before administration of the anti-T cell antigen-binding molecule, which is (a) 5 days before each administration during the step-up dosing period, and (b) 5 days before the first administration in each of the dosing cycles during the maintenance dosing period;
[1008] the cytokine inhibitor is administered before administration of the anti-T cell antigen-binding molecule, which is (a) 4 days before each administration during the step-up dosing period, and (b) 4 days before the first administration in each of the dosing cycles during the maintenance dosing period;
[1009] the cytokine inhibitor is administered before administration of the anti-T cell antigen-binding molecule, which is (a) 3 days before each administration during the step-up dosing period, and (b) 3 days before the first administration in each of the dosing cycles during the maintenance dosing period;
[1010] the cytokine inhibitor is administered before administration of the anti-T cell antigen-binding molecule, which is (a) 2 days before each administration during the step-up dosing period, and (b) 2 days before the first administration in each of the dosing cycles during the maintenance dosing period;
[1011] the cytokine inhibitor is administered before administration of the anti-T cell antigen-binding molecule, which is (a) 1 day before each administration during the step-up dosing period, and (b) 1 day before the first administration in each of the dosing cycles during the maintenance dosing period;
[1012] the cytokine inhibitor is administered before administration of the anti-T cell antigen-binding molecule (a) on the same day as each administration during the step-up dosing period, and (b) on the same day as the first administration in each of the dosing cycles during the maintenance dosing period; or
[1013] the cytokine inhibitor is administered simultaneously with administration of the anti-T cell antigen-binding molecule (a) on the same day as each administration during the step-up dosing period, and (b) on the same day as the first administration in each of the dosing cycles during the maintenance dosing period.

[1014] In a further embodiment, in the combination therapy of the present disclosure, in addition to pre-administration of a cytokine inhibitor according to the above embodiment, the cytokine inhibitor may be further administered to an individual on the same day as, or 1 day, 2 days, 3 days, 4 days, 5 days, or 6 days after the administration of the anti-T cell antigen-binding molecule. As specific examples, the cytokine inhibitor may be further administered as follows:
[1015] (a) on the same day as, or 1 day, 2 days, 3 days, 4 days, 5 days, or 6 days after administration during the step-up dosing period, and (b) on the same day as, or 1 day, 2 days, 3 days, 4 days, 5 days, or 6 days after the first administration in each of the dosing cycles during the maintenance dosing period (when the anti-T cell antigen-binding molecule is administered repeatedly at intervals of once every 2 weeks, and pre-administration of the cytokine inhibitor is performed (a) 6 days, 5 days, 4 days, 3 days, 2 days, or 1 day before each administration during the step-up dosing period and (b) 6 days, 5 days, 4 days, 3 days, 2 days, or 1 day before the said first administration in each of the dosing cycles during the maintenance dosing period); or
[1016] (a) 1 day, 2 days, 3 days, 4 days, 5 days, or 6 days after administration during the step-up dosing period, and (b) 1 day, 2 days, 3 days, 4 days, 5 days, or 6 days after the first administration in each of the dosing cycles during the maintenance dosing period (when the anti-T cell antigen-binding molecule is administered repeatedly at intervals of once every 2 weeks, and pre-administration of the cytokine inhibitor is performed (a) on the same day as each administration during the step-up dosing period and (b) on the same day as the said first administration in each of the dosing cycles during the maintenance dosing period).

### (Repeated Administration of the Anti-T Cell Antigen-Binding Molecule at Intervals of Once Every 3 Weeks)

[1017] In one embodiment, in the combination therapy of the present disclosure, (i) a step-up dosing period and a subsequent maintenance dosing period are comprised for an anti-T cell antigen-binding molecule, (ii) the anti-T cell antigen-binding molecule is administered repeatedly at intervals of once every 3 weeks during the step-up dosing period, (iii) the anti-T cell antigen-binding molecule is administered repeatedly at intervals of once every 3 weeks, in dosing cycles where 2, 3, 4, or 5 administrations constitute one cycle during the maintenance dosing period, and (iv) pre-administration of a cytokine inhibitor is performed (a) for each administration during the step-up dosing period, and (b) for the first administration in each of the dosing cycles during the maintenance dosing period. As specific examples, in the combination therapy of the present disclosure, (i) a step-up dosing period and a subsequent maintenance dosing period are comprised for an anti-T cell antigen-binding molecule, (ii) the anti-T cell antigen-binding molecule is administered repeatedly at intervals of once every 3 weeks during the step-up dosing period, (iii) the anti-T cell antigen-binding molecule is administered repeatedly at intervals of once every 3 weeks, in dosing cycles where 2, 3, 4, or 5 administrations constitute one cycle during the maintenance dosing period, and (iv) pre-administration of a cytokine inhibitor is performed according to the following embodiment:
[1018] the cytokine inhibitor is administered before administration of the anti-T cell antigen-binding molecule, which is (a) 6 days before each administration during the step-up dosing period, and (b) 6 days before the first administration in each of the dosing cycles during the maintenance dosing period;
[1019] the cytokine inhibitor is administered before administration of the anti-T cell antigen-binding molecule, which is (a) 5 days before each administration during the step-up dosing period, and (b) 5 days before the first administration in each of the dosing cycles during the maintenance dosing period;
[1020] the cytokine inhibitor is administered before administration of the anti-T cell antigen-binding molecule, which is (a) 4 days before each administration during the step-up dosing period, and (b) 4 days before the first administration in each of the dosing cycles during the maintenance dosing period;
[1021] the cytokine inhibitor is administered before administration of the anti-T cell antigen-binding molecule, which is (a) 3 days before each administration during the step-up dosing period, and (b) 3 days before the first administration in each of the dosing cycles during the maintenance dosing period;
[1022] the cytokine inhibitor is administered before administration of the anti-T cell antigen-binding molecule, which is (a) 2 days before each administration during the step-up dosing period, and (b) 2 days before the first administration in each of the dosing cycles during the maintenance dosing period;
[1023] the cytokine inhibitor is administered before administration of the anti-T cell antigen-binding molecule, which is (a) 1 day before each administration during the step-up dosing period, and (b) 1 day before the first administration in each of the dosing cycles during the maintenance dosing period;
[1024] the cytokine inhibitor is administered before administration of the anti-T cell antigen-binding molecule (a) on the same day as each administration during the step-up dosing period, and (b) on the same day as the first administration in each of the dosing cycles during the maintenance dosing period; or
[1025] the cytokine inhibitor is administered simultaneously with administration of the anti-T cell antigen-binding molecule (a) on the same day as each administration during the step-up dosing period, and (b) on the same day as the first administration in each of the dosing cycles during the maintenance dosing period.

[1026] In a further embodiment, in the combination therapy of the present disclosure, in addition to pre-administration of a cytokine inhibitor according to the above embodiment, the cytokine inhibitor may be further administered to an individual on the same day as, or 1 day, 2 days, 3 days, 4 days, 5 days, or 6 days after the administration of the anti-T cell antigen-binding molecule. As specific examples, the cytokine inhibitor may be further administered as follows:
[1027] (a) on the same day as, or 1 day, 2 days, 3 days, 4 days, 5 days, or 6 days after administration during the step-up dosing period, and (b) on the same day as, or 1 day, 2 days, 3 days, 4 days, 5 days, or 6 days after the first administration in each of the dosing cycles during the maintenance dosing period (when the anti-T cell antigen-binding molecule is administered repeatedly at intervals of once every 3 weeks, and pre-administration of the cytokine inhibitor is performed (a) 6 days, 5 days, 4 days, 3 days, 2 days, or 1 day before each administration during the step-up dosing period and (b) 6 days, 5 days, 4 days, 3 days, 2 days, or 1 day before the said first administration in each of the dosing cycles during the maintenance dosing period); or
[1028] (a) 1 day, 2 days, 3 days, 4 days, 5 days, or 6 days after administration during the step-up dosing period, and (b) 1 day, 2 days, 3 days, 4 days, 5 days, or 6 days after the first administration in each of the dosing cycles during the maintenance dosing period (when the anti-T cell antigen-binding molecule is administered repeatedly at intervals of once every 3 weeks, and pre-administration of the cytokine inhibitor is performed (a) on the same day as each administration during the step-up dosing period and (b) on the same day as the said first administration in each of the dosing cycles during the maintenance dosing period).

### (Repeated Administration of the Anti-T Cell Antigen-Binding Molecule at Intervals of Once Every 4 Weeks)

[1029] In one embodiment, in the combination therapy of the present disclosure, (i) a step-up dosing period and a subsequent maintenance dosing period are comprised for an anti-T cell antigen-binding molecule, (ii) the anti-T cell antigen-binding molecule is administered repeatedly at intervals of once every 4 weeks during the step-up dosing period, (iii) the anti-T cell antigen-binding molecule is administered repeatedly at intervals of once every 4 weeks, in dosing cycles where 2, 3, 4, or 5 administrations constitute one cycle during the maintenance dosing period, and (iv) pre-administration of a cytokine inhibitor is performed (a) for each administration during the step-up dosing period, and (b) for the first administration in each of the dosing cycles during the maintenance dosing period. As specific examples, in the combination therapy of the present disclosure, (i) a step-up dosing period and a subsequent maintenance dosing period are comprised for an anti-T cell antigen-binding molecule, (ii) the anti-T cell antigen-binding molecule is administered repeatedly at intervals of once every 4 weeks during the step-up dosing period, (iii) the anti-T cell antigen-binding molecule is administered repeatedly at intervals of once every 4 weeks, in dosing cycles where 2, 3, 4, or 5 administrations constitute one cycle during the maintenance dosing period, and (iv) pre-administration of a cytokine inhibitor is performed according to the following embodiment:
[1030] the cytokine inhibitor is administered before administration of the anti-T cell antigen-binding molecule, which is (a) 6 days before each administration during the step-up dosing period, and (b) 6 days before the first administration in each of the dosing cycles during the maintenance dosing period;
[1031] the cytokine inhibitor is administered before administration of the anti-T cell antigen-binding molecule, which is (a) 5 days before each administration during the step-up dosing period, and (b) 5 days before the first administration in each of the dosing cycles during the maintenance dosing period;
[1032] the cytokine inhibitor is administered before administration of the anti-T cell antigen-binding molecule, which is (a) 4 days before each administration during the step-up dosing period, and (b) 4 days before the first administration in each of the dosing cycles during the maintenance dosing period;
[1033] the cytokine inhibitor is administered before administration of the anti-T cell antigen-binding molecule, which is (a) 3 days before each administration during the step-up dosing period, and (b) 3 days before the first administration in each of the dosing cycles during the maintenance dosing period;
[1034] the cytokine inhibitor is administered before administration of the anti-T cell antigen-binding molecule, which is (a) 2 days before each administration during the step-up dosing period, and (b) 2 days before the first administration in each of the dosing cycles during the maintenance dosing period;
[1035] the cytokine inhibitor is administered before administration of the anti-T cell antigen-binding molecule, which is (a) 1 day before each administration during the step-up dosing period, and (b) 1 day before the first administration in each of the dosing cycles during the maintenance dosing period;
[1036] the cytokine inhibitor is administered before administration of the anti-T cell antigen-binding molecule (a) on the same day as each administration during the step-up dosing period, and (b) on the same day as the first administration in each of the dosing cycles during the maintenance dosing period; or
[1037] the cytokine inhibitor is administered simultaneously with administration of the anti-T cell antigen-binding molecule (a) on the same day as each administration during the step-up dosing period, and (b) on the same day as the first administration in each of the dosing cycles during the maintenance dosing period.

[1038] In a further embodiment, in the combination therapy of the present disclosure, in addition to pre-administration of a cytokine inhibitor according to the above embodiment, the cytokine inhibitor may be further administered to an individual on the same day as, or 1 day, 2 days, 3 days, 4 days, 5 days, or 6 days after the administration of the anti-T cell antigen-binding molecule. As specific examples, the cytokine inhibitor may be further administered as follows:
[1039] (a) on the same day as, or 1 day, 2 days, 3 days, 4 days, 5 days, or 6 days after administration during the step-up dosing period, and (b) on the same day as, or 1 day, 2 days, 3 days, 4 days, 5 days, or 6 days after the first administration in each of the dosing cycles during the maintenance dosing period (when the anti-T cell antigen-binding molecule is administered repeatedly at intervals of once every 4 weeks, and pre-administration of the cytokine inhibitor is performed (a) 6 days, 5 days, 4 days, 3 days, 2 days, or 1 day before each administration during the step-up dosing period and (b) 6 days, 5 days, 4 days, 3 days, 2 days, or 1 day before the said first administration in each of the dosing cycles during the maintenance dosing period); or
[1040] (a) 1 day, 2 days, 3 days, 4 days, 5 days, or 6 days after administration during the step-up dosing period, and (b) 1 day, 2 days, 3 days, 4 days, 5 days, or 6 days after the first administration in each of the dosing cycles during the maintenance dosing period (when the anti-T cell antigen-binding molecule is administered repeatedly at intervals of once every 4 weeks, and pre-administration of the cytokine inhibitor is performed (a) on the same day as each administration during the step-up dosing period and (b) on the same day as the said first administration in each of the dosing cycles during the maintenance dosing period).

### (Repeated Administration of the Anti-T Cell Antigen-Binding Molecule at Intervals of Once Every 5 Weeks)

[1041] In one embodiment, in the combination therapy of the present disclosure, (i) a step-up dosing period and a subsequent maintenance dosing period are comprised for an anti-T cell antigen-binding molecule, (ii) the anti-T cell antigen-binding molecule is administered repeatedly at intervals of once every 5 weeks during the step-up dosing period, (iii) the anti-T cell antigen-binding molecule is administered repeatedly at intervals of once every 5 weeks, in dosing cycles where 2, 3, 4, or 5 administrations constitute one cycle during the maintenance dosing period, and (iv) pre-administration of a cytokine inhibitor is performed (a) for each administration during the step-up dosing period, and (b) for the first administration in each of the dosing cycles during the maintenance dosing period. As specific examples, in the combination therapy of the present disclosure, (i) a step-up dosing period and a subsequent maintenance dosing period are comprised for an anti-T cell antigen-binding molecule, (ii) the anti-T cell antigen-binding molecule is administered repeatedly at intervals of once every 5 weeks during the step-up dosing period, (iii) the anti-T cell antigen-binding molecule is administered repeatedly at intervals of once every 5 weeks, in dosing cycles where 2, 3, 4, or 5 administrations constitute one cycle during the maintenance dosing period, and (iv) pre-administration of a cytokine inhibitor is performed according to the following embodiment:
[1042] the cytokine inhibitor is administered before administration of the anti-T cell antigen-binding molecule, which is (a) 6 days before each administration during the step-up dosing period, and (b) 6 days before the first administration in each of the dosing cycles during the maintenance dosing period;
[1043] the cytokine inhibitor is administered before administration of the anti-T cell antigen-binding molecule, which is (a) 5 days before each administration during the step-up dosing period, and (b) 5 days before the first administration in each of the dosing cycles during the maintenance dosing period;
[1044] the cytokine inhibitor is administered before administration of the anti-T cell antigen-binding molecule, which is (a) 4 days before each administration during the step-up dosing period, and (b) 4 days before the first administration in each of the dosing cycles during the maintenance dosing period;
[1045] the cytokine inhibitor is administered before administration of the anti-T cell antigen-binding molecule, which is (a) 3 days before each administration during the step-up dosing period, and (b) 3 days before the first administration in each of the dosing cycles during the maintenance dosing period;
[1046] the cytokine inhibitor is administered before administration of the anti-T cell antigen-binding molecule, which is (a) 2 days before each administration during the step-up dosing period, and (b) 2 days before the first administration in each of the dosing cycles during the maintenance dosing period;
[1047] the cytokine inhibitor is administered before administration of the anti-T cell antigen-binding molecule, which is (a) 1 day before each administration during the step-up dosing period, and (b) 1 day before the first administration in each of the dosing cycles during the maintenance dosing period;
[1048] the cytokine inhibitor is administered before administration of the anti-T cell antigen-binding molecule (a) on the same day as each administration during the step-up dosing period, and (b) on the same day as the first administration in each of the dosing cycles during the maintenance dosing period; or
[1049] the cytokine inhibitor is administered simultaneously with administration of the anti-T cell antigen-binding molecule (a) on the same day as each administration during the step-up dosing period, and (b) on the same day as the first administration in each of the dosing cycles during the maintenance dosing period.

[1050] In a further embodiment, in the combination therapy of the present disclosure, in addition to pre-administration of a cytokine inhibitor according to the above embodiment, the cytokine inhibitor may be further administered to an individual on the same day as, or 1 day, 2 days, 3 days, 4 days, 5 days, or 6 days after the administration of the anti-T cell antigen-binding molecule. As specific examples, the cytokine inhibitor may be further administered as follows:
[1051] (a) on the same day as, or 1 day, 2 days, 3 days, 4 days, 5 days, or 6 days after administration during the step-up dosing period, and (b) on the same day as, or 1 day, 2 days, 3 days, 4 days, 5 days, or 6 days after the first administration in each of the dosing cycles during the maintenance dosing period (when the anti-T cell antigen-binding molecule is administered repeatedly at intervals of once every 5 weeks, and pre-administration of the cytokine inhibitor is performed (a) 6 days, 5 days, 4 days, 3 days, 2 days, or 1 day before each administration during the step-up dosing period and (b) 6 days, 5 days, 4 days, 3 days, 2 days, or 1 day before the said first administration in each of the dosing cycles during the maintenance dosing period); or
[1052] (a) 1 day, 2 days, 3 days, 4 days, 5 days, or 6 days after administration during the step-up dosing period, and (b) 1 day, 2 days, 3 days, 4 days, 5 days, or 6 days after the first administration in each of the dosing cycles during the maintenance dosing period (when the anti-T cell antigen-binding molecule is administered repeatedly at intervals of once every 5 weeks, and pre-administration of the cytokine inhibitor is performed (a) on the same day as each administration during the step-up dosing period and (b) on the same day as the said first administration in each of the dosing cycles during the maintenance dosing period).

### VI. Combination Therapies with an Anti-Glypican 3 (GPC3)/T Cell Receptor Complex Bispecific Antibody and a Cytokine Inhibitor

[1053] In one embodiment, the present disclosure provides a pharmaceutical composition comprising an anti-GPC3/T cell receptor complex bispecific antibody, wherein the pharmaceutical composition is for use in its combination therapy with a cytokine inhibitor. In a different embodiment, the present disclosure provides a pharmaceutical composition comprising a cytokine inhibitor, wherein the pharmaceutical composition is for use in its combination therapy with an anti-glypican 3 (GPC3)/T cell receptor complex bispecific antibody. In one embodiment, the cytokine inhibitor is administered to an individual before, simultaneously with, or after administration of the anti-GPC3/T cell receptor complex bispecific antibody. In another embodiment, if CRS or signs of CRS develop in the individual after administration of the anti-GPC3/T cell receptor complex bispecific antibody, the cytokine inhibitor is administered to the individual with an aim to treat the CRS.

[1054] Although not intended to be limiting, when a cytokine inhibitor is administered before or simultaneously with administration of an anti-GPC3/T cell receptor complex bispecific antibody, the inhibitor has effects of preventing or alleviating the development of CRS associated with administration of the anti-GPC3/T cell receptor complex bispecific antibody. In one embodiment, the cytokine inhibitor is administered 6 days, 5 days, 4 days, 3 days, 2 days, or 1 day before the administration of the anti-GPC3/T cell receptor complex bispecific antibody, or on the same day as but before the administration of the bispecific antibody. Alternatively, the cytokine inhibitor is administered on the same day as administration of the anti-GPC3/T cell receptor complex bispecific antibody, and simultaneously with the bispecific antibody (pre-administration of the cytokine inhibitor). For specific examples of the combination therapy comprising pre-administration of the cytokine inhibitor, see the various embodiments described above. Furthermore, when the cytokine inhibitor is administered after administration of the anti-GPC3/T cell receptor complex bispecific antibody and before development of CRS, it has effects of preventing or alleviating the CRS which may develop afterward. Furthermore, when the cytokine inhibitor is administered after administration of the anti-GPC3/T cell receptor complex bispecific antibody and after development of CRS or signs of CRS, the inhibitor has effects of treating CRS and alleviating the symptoms of CRS. In one embodiment, pre-administration of the cytokine inhibitor prevents or alleviates development of CRS associated with administration of the anti-GPC3/T cell receptor complex bispecific antibody without significantly compromising the drug efficacy of the anti-GPC3/T cell receptor complex bispecific antibody (for example, T cell-dependent cellular cytotoxicity (TDCC) and antitumor effects).

### VII. Production Methods and Kits

[1055] The present invention also provides a kit for use in the method of the present invention, which comprises the multispecific antigen-binding molecule of the present invention or the multispecific antigen-binding molecule produced by the production method of the present invention. In addition, the kit may include in its package a pharmaceutically acceptable carrier, medium, and instructions describing the method of use, and such.

[1056] The present invention also relates to a multispecific antigen-binding molecule of the present invention or a multispecific antigen-binding molecule produced by the production method of the present invention for use in the method of the present invention.

[1057] The present invention also relates to nucleic acids encoding these molecules, vectors into which the nucleic acids have been introduced, cells containing the nucleic acids or the vectors, methods for producing the molecules by culturing the cells, and molecules produced by the methods.

[1058] For example, if the T-cell antigen-binding molecule is a multispecific antigen-binding molecule, the multispecific antigen-binding molecule can be produced by introducing into an appropriate host cell, a nucleic acid encoding the multispecific antigen-binding molecule or a vector into which the nucleic acid has been introduced and t culturing the host cell. When the multispecific antigen-binding molecule is secreted, the multispecific antigen-binding molecule of interest can be recovered from the culture supernatant. A method for purifying the multispecific antigen-binding molecule of interest from the culture is also known. On the other hand, if the cytokine inhibitor is a protein component such as an antibody, it can be produced in the same manner as the multispecific antigen-binding molecule by introducing into an appropriate host cell, the nucleic acid encoding the cytokine inhibitor molecule or the vector into which the nucleic acid is introduced, and culturing the host cell.

[1059] In the present disclosure, the T cell antigen-binding molecule and the cytokine inhibitor can be independently packaged with a pharmaceutically acceptable carrier, medium, instructions describing the method of use, and such. Alternatively, both can be formulated and then combined to form a kit. Specifically, the kit can include, for example, a package containing a formulated T cell antigen-binding molecule and a package containing a formulated cytokine inhibitor. When each of the formulations constituting the kit is a lyophilized one or a concentrated liquid formulation, a liquid medium for dissolving or diluting the formulation can be combined with the kit.

[1060] It should be noted that all prior art documents cited herein are incorporated herein by reference.

### EXAMPLE

### Example 1

[1061] ERY974 Single-Drug Dose-Escalation Study in Patients with Glypican-3 (GPC3)-Positive Advanced Cancer

[1062] The ERY101EG study is a phase I clinical trial targeting patients with Glypican-3-positive advanced solid tumors, and the dose was escalated from the initial dose of 0.0031 μg/kg as determined by the Minimum Anticipated Biological Effect Level (MABEL) and NOAEL. In the present study, the tolerability of ERY974 was evaluated in one to three subjects per cohort, and the dose (or target dose) was gradually increased when proceeding from one cohort to the next.

[1063] In the clinical trial, ERY974 was administered intravenously once every week. The intravenous administration of ERY974 was performed for three hours, and then, flush with physiological saline solution was performed for one hour. When the clinical trial investigator determined that there was no problem with the safety of the subjects, the administration duration of ERY974 was allowed to be shortened to a minimum of two hours.

[1064] In the present study, pre-administration of a steroid was performed in all cases to handle the cytokine release syndrome. Specifically, the pre-administration was defined such that at the first and second administrations of ERY974, dexamethasone is orally administered in the afternoon of the day before the ERY974 administrations; one hour before the start of the ERY974 administrations, dexamethasone is further administered intravenously, and antihistamine and paracetamol are pre-administered.

[1065] According to the rules of the protocol, up to the first case of cohort 5, for the first and second administrations of ERY974, the dose of dexamethasone pre-administered in the afternoon of the day before the ERY974 administrations was 8 mg by oral administration, and at the first administration of ERY974, the dose of dexamethasone pre-administered one hour before the start of ERY974 administration was 8 mg by intravenous administration. For subjects from the second case in cohort 5 to cohort 8A, the dose of dexamethasone pre-administered one hour before the start of ERY974 administration was increased to 20 mg. The dose and dosing schedule of dexamethasone in each cohort were those recommended by the Safety Monitoring Committee (SMC) and decided by the sponsor for use during dose escalation.

### (1-1) Fixed Dose Regimen

[1066] For cohorts 1-5, the dose of ERY974 decided for each cohort was repeatedly administered by intravenous drip infusion at intervals of once every week (QW) until the discontinuation criteria were met. Then, the dose limiting toxicity (DLT) was evaluated using the period from the first administration to the seventh day after the third administration (including the administration day) as the DLT evaluation period. This is called a fixed dose regimen. The administered dose for each cohort in cohorts 1-5 is shown in Table 10.

TABLE 10

| | | |
|---|---|---|
| Cohort 1 | 0.0031 | μg/kg |
| Cohort 2 | 0.009 | μg/kg |
| Cohort 3 | 0.027 | μg/kg |
| Cohort 4 | 0.081 | μg/kg |
| Cohort 5 | 0.24 | μg/kg |

### (1-2) Step-Up Dosing Regimen

[1067] From cohort 6 and beyond, ERY974 was repeatedly administered by intravenous drip infusion at QW in the same manner as in cohorts 1 to 5, but the dose was increased sequentially for the first, second, third, and/or fourth administrations. That is, first, a low dose of ERY974 was administered to the subjects for the first (Day 1) administration (0.081 μg/kg in cohort 6 and 0.12 μg/kg in cohort 7 and beyond). Then, in the second and subsequent administrations, the dose to the subject was sequentially increased until the dose reached the target dose designated for each cohort.

[1068] Specifically, in cohort 6, 0.081 μg/kg was administered on Day 1 and 0.24 μg/kg was administered from Day 8 and beyond, and in cohort 7, 0.12 μg/kg was administered on Day 1 and 0.24 μg/kg was administered on Day 8 and beyond. In cohorts 8A, 9A, and 10A, 0.12 μg/kg was administered in the first (Day 1) administration and the target dose designated for each cohort was administered in the second (Day 8) administration (this is called the Fixed Day 1 regimen). Next, in cohorts 8B and 9B, 0.12 μg/kg was administered in the first (Day 1) administration and second (Day 8) administration, 0.24 μg/kg was administered in the third (Day 15) administration, and the target dose designated for each cohort was administered in the fourth (Day 22) administration (this is called the Fixed Day 15 regimen). DLT was evaluated for the Fixed Day1 regimen, by setting the DLT evaluation period from the first administration to the seventh day after the third administration (including the administration day), and for the Fixed Day15 regimen, by setting the DLT evaluation period from the first administration to the seventh day after the fourth administration (including the administration day).

[1069] In the present study, the target doses were 0.24 μg/kg for cohorts 6 and 7, 0.36 μg/kg for cohorts 8A and 8B, 0.54 μg/kg for cohorts 9A and 9B, and 0.81 μg/kg for cohort 10A. From cohort 1 to cohort 10A, a total of 29 subjects were administered ERY974.

### Example 2

### Evaluation Items and Evaluation Results in the ERY101EG Study

[1070] The ERY101EG mainly evaluated the occurrence of adverse events (AE) and the development of dose limiting toxicity (DLT) in the dosage and administration for each cohort.

### (2-1) Adverse Event (AE)

[1071] The main AEs associated with ERY974 administration (manifested in four or more out of 29 patients) were cytokine release syndrome (CRS, 66%), fever (24%), nausea (17%), and fatigue (14%). The severity of the CRS was mostly Grade 1/2, while Grade 3 events were also seen in four patients. Most of the CRS manifested within two days after ERY974 administration. Accordingly, major AE associated with ERY974 was evaluated to be CRS. The severity of CRS was evaluated based on the National Cancer Institute Common Terminology Criteria for Adverse Events (CTCAE) v4.03 (the above Table 6), in a similar manner to other adverse events at the start of the study, and for cohort 8B and beyond, it was evaluated based on Lee's criteria in 2014 (the above Table 8).

### (2-2) Dose Limiting Toxicity (DLT)

[1072] The severity of AE was evaluated based on CTCAE v4.03. Among the AEs manifested during the DLT evaluation period, those predetermined to be events for which a causal relationship with ERY974 cannot be ruled out and that interfere with dose increase and/or continued administration of ERY974 were defined as DLT, and manifestation of DLT in each cohort was evaluated.

[1073] DLT was not observed in cohorts 1 to 9. DLT was reported in two out of three enrolled in cohort 10A. In both of the two patients, due to cytokine release syndrome (one case of Grade 2 and one case of Grade 3) that manifested after administration of 0.81 μg/kg of ERY974 on the second (Day 8) administration, the third (Day 15) administration of ERY974 had to be postponed. Therefore, this corresponded to the above-mentioned predetermined DLT standard, and it was judged to be DLT. In cohort 10A, one subject who did not show DLT also manifested cytokine release syndrome (Grade 2) after administration of ERY974 at 0.81 μg/kg in the second (Day 8) administration, and the dose of ERY974 was reduced in the third (Day 15) administration. Therefore, the regimen/dose of cohort 10A was concluded to be dosage and administration intolerable under steroid pre-administration conditions.

(2-3) Comparison of Fixed Day 1 Regimen with Fixed Day 15 Regimen

[1074] Furthermore, the Fixed Day 1 regimen was compared with the Fixed Day 15 regimen when the target doses were the same. Specifically, in cohorts 8A and 9A (Fixed Day 1 regimen) and cohorts 8B and 9B (Fixed Day 15 regimen), the manifestation frequency and severity of CRS, the main AE of ERY974, were compared after the first two ERY974 administrations at the target dose (ERY974 administrations on the second (Day 8) and third (Day 15) administrations in the Fixed Day 1 regimen, or on the fourth (Day 22) and fifth (Day 29) administrations in the Fixed Day 15 regimen). As a result, the number of cases manifesting CRS was 1, 0, 3, and 3 case(s), which are Grade 1 or 2, in cohorts 8A, 8B, 9A, and 9B (three patients each), respectively, and no clear difference was observed between cohorts 8A and 8B and between cohorts 9A and 9B. Since cohort 10B (Fixed Day 15 regimen, target dose of 0.81 μg/kg) was not tested in the ERY101EG study, DLT detection was not performed in the Fixed Day 15 regimen examination, and therefore one cannot conclude that cohort 10B had intolerable dosage and administration. However, there were no indications from the results up to cohort 9B suggesting that the Fixed Day 15 regimen was superior to the Fixed Day 1 regimen in terms of CRS suppression.

### (2-4) Antitumor Effect

[1075] Of the 29 patients enrolled in this study, partial response (PR) was observed in one patient enrolled in cohort 9B (0.54 mg/kg). Other patients had stable disease (SD) or progressive disease (PD). When the blood concentration of ERY974 in the subject who showed a partial response was checked, it corresponded to the EC10-EC30 concentration calculated from the cell growth inhibitory activity in vitro. On the other hand, to reach the dose to attain the target blood concentration in 70% of the subjects, achieving a higher dose seemed necessary.

### (2-5) Discussion

[1076] Given the course of the above study, observation results that DLT manifested in cohort 10A, and the dose at which drug efficacy is estimated, adopting a method for managing CRS manifestation separate from a different Fixed Day regimen examination seemed necessary.

### Example 3

### Analysis of Cytokine Release Syndrome (CRS) Developed in the ERY101EG Study, and Increase of IL-6 and Use of Tocilizumab in the ERY101EG Study

[1077] (3-1) Cytokine Level after ERY974 Administration

[1078] In the ERY101EG study, an increase in IL-6 associated with ERY974 administration was confirmed in some subjects who manifested cytokine release syndrome (CRS). Three subjects enrolled in cohort 10A manifested CRS requiring interruption or dose reduction of ERY974 after the second (Day 8) administration of ERY974 (after administration of the first target dose of 0.81 μg/kg) (2 cases of Grade 2 and 1 case of Grade 1), and in these 3 patients, increase in IL-6, IL-8 and IL-10 was observed within 24 hours after the end of the second (Day 8) study drug administration (FIGS. 4A, 4B and 4C) (the lower limit of quantification was plotted if the increase was at or below the lower limit of quantification). CRS was observed in two of the three patients (subject IDs 840010006 and 840010007) after the second (Day 8) study drug administration, and Tocilizumab was used as described below. One of them (subject ID 840010007) showed another increase in cytokine levels including IL-6 after the third (Day 15) administration, but did not manifest CRS symptoms. In the other subject, CRS (Grade 3) manifested again after re-administration.

### (3-2) Use of Tocilizumab for the Treatment of CRS

[1079] In the ERY101EG study, Tocilizumab was used alone or in combination with a steroid and such for the treatment of CRS in some patients at the discretion of the clinical trial investigator (Table 11). The severity of CRS ranged from Grade 1 to Grade 3. Tocilizumab was administered on the same day as the manifestation of CRS, with the exception of two patients, two cases (cohort 10A, 840010006, 840010007). In all of the Tocilizumab-administered cases, CRS recovered four days after the day of Tocilizumab administration.

TABLE 11
List of patients for which Tocilizumab was used in the 101EG study

| | | Number of the | | | | | | | Manifestation | |
|---|---|---|---|---|---|---|---|---|---|---|
| | | administrations | | | | | | Number of the | of CRS after | |
| | | of this agent | | | | | | administrations | Tocilizumab | |
| | | immediately | | | | Duration from | | of this agent | administration | |
| | | before | | | | Tocilizumab | | after | and until | |
| | | Tocilizumab | | Timing of | | administration | | Tocilizumab | the next | Presence or |
| | | administration | Grade | Tocilizumab | Dose of | to recovery | | administration | administration | absence of |
| Patient ID | Cohort | (Dose) | of CRS | administration | Tocilizumab | from CRS | | (Dose) | of this agent | CRS recurrence |
| 840020017 | 8A | 1st | 2 | Same day | Not | 0 | days | 3 times | None | Absent |
| | | administration | (Non- | as CRS | known | | | (0.36 μg/kg) | | |
| | | (0.12 μg/kg) | critical) | manifes- | | | | | | |
| | | | | tation | | | | | | |
| 840060002 | 8B | 3rd | 2 | Same day | 8 mg/kg | 2 | days | 9 times | None | Absent |
| | | administration | | as CRS | | | | (0.36 μg/kg) | | |
| | | (0.24 μg/kg) | | manifes- | | | | | | |
| | | | | tation | | | | | | |
| 840020021 | 9A | 3rd | 1 | Same day | 4 mg/kg | 0 | days | 9 times | None | Absent |
| | | administration | | as CRS | | | | (0.54 μg/kg) | | |
| | | (0.54 μg/kg) | | manifes- | | | | | | |
| | | | | tation | | | | | | |
| 840020022 | 9A | 3rd | 2 | Within 2 | 4 mg/kg | 0 | days | 3 times | None | Absent |
| | | administration | | hours from | | | | (0.54 μg/kg) | | |
| | | (0.54 μg/kg) | | CRS mani- | | | | | | |
| | | | | festation | | | | | | |
| 840020023 | 9B | 4th | 2 | Same day | 4 mg/kg | 0 | days | 19 times | None | Absent |
| | | administration | | as CRS | | | | (0.54 μg/kg) | | |
| | | (0. 54 μg/kg) | | manifes- | | | | | | |
| | | | | tation | | | | | | |
| 840010006 | 10A | 2nd | 3 | 3 days after | 8 mg/kg | 4 | days | 1 time | None | Present |
| | | administration | | CRS | | | | (0.54 μg/kg) | | |
| | | (0.81 μg/kg) | | manifes- | | | | | | |
| | | | | tation | | | | | | |
| | | 3rd | 3 | Same day | 8 mg/kg | 3 | days | 0 times | Not | Not |
| | | administration | | as CRS | | | | | applicable | applicable |
| | | (0.54 μg/kg) | | manifes- | | | | | | |
| | | | | tation | | | | | | |
| 840010007 | 10A | 2nd | 2 | 6 days after | 8 mg/kg | 1 | day | 2 times | None | Absent |
| | | administration | | CRS | | | | (0.54, | | |
| | | (0.81 μg/kg) | | manifes- | | | | 0.81 μg/kg) | | |
| | | | | tation | | | | | | |

### Example 4

### Simulation of Pre-Administration of Tocilizumab in ERY974 Monotherapy

### (4-1) Setting Estimated Effective Concentration of Tocilizumab

[1080] It is known that the elimination of Tocilizumab involves not only the elimination pathway of non-specific antibodies but also the elimination mediated by binding with the target IL-6R. The elimination mediated by the binding with IL-6R was shown saturated at high concentration of Tocilizumab, and the saturation of this elimination is considered to be the saturation of the binding between Tocilizumab and IL-6R (IL-6R). Therefore, it is presumed that saturation of the binding with IL-6R is a sufficient condition for IL-6-mediated signal inhibition, and it was considered important for the serum concentration of Tocilizumab to maintain the concentration at which the binding between Tocilizumab and IL-6R is considered to be always saturated, that is, the concentration at which elimination of Tocilizumab mediated by binding with IL-6R is saturated.

[1081] In a report by a population pharmacokinetic model incorporating the Michaelis-Menten equation for the elimination of Tocilizumab from serum, the results of analysis by Frey et al. (Frey, N., Grange, S. and Woodworth, T. (2010), Population Pharmacokinetic Analysis of Tocilizumab in Patients with Rheumatoid Arthritis. The Journal of Clinical Pharmacology, 50: 754-766) (hereinafter referred to as “the article by Frey et al.”) report 2.7 μg/mL as a Michaelis coefficient (Km) for target-mediated elimination. From the Kₘ value, the serum concentration of Tocilizumab required for binding to 80% or more of IL-6R is theoretically 10.8 μg/mL or more, and the simulation results showed non-linear elimination below 10 μg/mL (FIG. 5A).

[1082] Furthermore, Gibiansky et al. have reported a population pharmacokinetic model that expresses the process of formation and elimination of IL-6R in serum (IL-6R has membrane-bound IL-6R and soluble IL-6R, and IL-6R in serum is the latter) as indirect response model and incorporates binding to Tocilizumab for the elimination of the unbound IL-6R (referring to IL-6R that does not form a complex with IL-6) (Gibiansky, L. and Frey, N., Linking interleukin-6 receptor blockade with tocilizumab and its hematological effects using a modeling approach. J Pharmacokinet Pharmacodyn. 2012 February; 39 (1): 5-16) (hereafter referred to as “the article by Gibiansky et al.”). In the report by Gibiansky et al., non-linear elimination is clearly visible when the median serum concentration of Tocilizumab is 10 μg/mL or less (FIG. 5B). From the above, the estimated effective serum concentration (target concentration) of Tocilizumab was set to 10 μg/mL.

### (4-2) Route of Tocilizumab Administration

[1083] In the ERY101EG study, most of CRS following ERY974 administration was reported from the day of the administration to the following day; therefore, the route selected for administration of Tocilizumab was intravenous administration that allows the serum concentration of Tocilizumab to be maintained at a high concentration by 48 hours after ERY974 administration (FIGS. 6A and 6B).

(4-3) Setting the Dose and Dosing Frequency of Tocilizumab that Allow Maintenance of the Target Concentration

[1084] Tocilizumab has been approved by the US Food and Drug Administration (FDA) for use in the treatment of severe or life-threatening CRS associated with CAR-T cell therapy, and administration of 8 mg/kg/8 h to patients weighing 30 kg or more has been accepted. Therefore, 8 mg/kg was selected as a dose of Tocilizumab per administration. According to the simulation results (FIGS. 5A and 5B), exposure exceeding the target concentration could be obtained in 95% of the patients between 7 and 14 days after administration, and in 50% of the patients between 14 and 21 days after administration. Based on the above, when 8 mg/kg was selected as a dose of Tocilizumab per administration, patients who can maintain a trough concentration (referring to the lowest blood drug concentration under steady state when the drug is administered repeatedly) exceeding the target of 10 μg/mL at 21 days or more after administration, were less than half of the patients in any model; therefore, the recommended dosing interval of Tocilizumab was three weeks or less.

[1085] In addition, the model reported in the above article by Gibiansky et al. allows simulation of unbound IL-6R, and change in the unbound IL-6R over time when Tocilizumab is administered at a dose of 8 mg/kg per administration is shown in FIG. 7. According to the simulation results, the unbound IL-6R was 1.0 to 2.3 ng/mL in 95% of the patients up to 7 days after the administration, whereas it was increased to 3.9 to 8.3 ng/mL at 14 days after the administration, and to 4.5 to 54 ng/mL at 21 days after the administration. At 28 days after the administration, patients having nearly the same amount of unbound IL-6R as before the administration were estimated to be about 30%. The above suggested that, when 8 mg/kg is selected as a dose of Tocilizumab per administration, the number of patients in which the inhibitory effect of sIL-6R cannot be expected increases beyond three weeks after administration.

[1086] On the other hand, long-term high exposure to Tocilizumab is not recommended due to concerns of side effects such as infection, and the highest number of reported CRS manifestation in the ERY101EG study was during the first to third administrations (for example, see Example 3-2). Therefore, it was decided to intravenously administer Tocilizumab at 8 mg/kg before the first administration of ERY974 at the start of the ERY102JP study (details are shown in Example 5), and to examine the inhibitory effect the Tocilizumab administration on CRS until the third administration of ERY974.

(4-4) Estimated Value of IL-6 Concentration that Increases after ERY974 Administration and Examination of Dosing Frequency of Tocilizumab

[1087] In the ERY101EG study, the maximum serum IL-6 concentration was about 10 ng/mL (approximately 0.4 nM) (see Example 3), which is higher than the concentration reported for rheumatic patients (0.7-981 pg/mL) (see the above article by Frey et al.). This suggested that it may not be possible to sufficiently inhibit the IL-6 signal increased by CRS even at concentrations where efficacy of Tocilizumab can be demonstrated in rheumatic patients. Therefore, assuming that IL-6 increases after ERY974 administration, the IL-6/IL-6R complex concentrations were calculated assuming situations where IL-6 concentrations are 300, 1000, 3000, 5000, and 10000 pg/mL in the presence of unbound sIL-6R calculated from the Gibiansky model (it is understood that the higher the IL-6/IL-6R complex concentrations are, the more IL-6 signaling occurs). The calculation was performed based on the following formula, presuming that the reaction between IL-6 and IL-6R is under equilibrium. The Kd value used is the value reported by Baran et al. (Baran P, Hansen S, Waetzig G H, et al. The balance of interleukin (IL)-6, IL-6 soluble IL-6 receptor (sIL-6R), and IL-6 sIL-6R sgp130 complexes allows simultaneous classic and trans-signaling. J Biol Chem. 2018; 293 (18): 6762-6775.) (hereinafter referred to as “the article by Baren et al.”), which is 22 nM.

$$K d = \frac{complex ( IL - {6}_{bound} , sIL - 6 {R}_{bound} )}{IL - {6}_{unbound} \cdot sIL - 6 {R}_{unbound}}$$

[1088] Assuming that CRS will continue to occur during QW administration of ERY974, the dosing interval of Tocilizumab (8 mg/kg per dose) was examined for administration once every week (QW), once every 2 weeks (Q2W), once every 3 weeks (Q3W), and once every 4 weeks (Q4W), and the results are shown in FIGS. 8A to 8D. Here, it is presumed that a certain concentration of the IL-6/IL-6R complex is necessary for the development of CRS; however, the concentration that causes CRS has not been specified by the findings so far. However, at the same serum Tocilizumab concentration, the speculation is that the higher the IL-6 concentration is, the higher the IL-6/IL-6R complex concentration is, and the more easily CRS is initiated (FIG. 11). This suggests that the target concentration estimated from rheumatic patients may not be sufficient for suppressing CRS after ERY974 administration. Thus, if the target concentration of Tocilizumab estimated from rheumatoid patients is not sufficient for suppressing CRS after ERY974 administration, administering Tocilizumab multiple times to keep the IL-6/IL-6R complex concentration low, is expected to yield effects of suppressing IL-6-mediated signals (FIGS. 9 and 10).

[1089] As described above, at the start of the ERY102JP study (its details are shown in Example 5), 8 mg/kg of Tocilizumab will be intravenously administered before the first administration of ERY974, and the inhibitory effect of the Tocilizumab administration on CRS until the third administration of ERY974 will be examined. However, if an increase in IL-6 caused at the time of the second or subsequent administration of ERY974 is observed and CRS is reported in this study, administering Tocilizumab multiple times is expected to suppress IL-6-mediated signals even if the serum IL-6 concentration is high, as described above (FIGS. 9 to 11). Therefore, in such a case, it is assumed that the number of administrations of Tocilizumab and/or the dosing interval are changed.

### (4-5) Examination of Validity and Dose Change for Pre-Administration of Tocilizumab

[1090] The direct action of ERY974 is activation of CD3+ T cells, but increase in IL-6, thought to be causing CRS, has been reported to be contributed by T cell activation and also by secondary activation of immune cells (see, for example, Giavridis, Theodoros et al., CAR T cell-induced cytokine release syndrome is mediated by macrophages and abated by IL-1 blockade. Nature medicine vol. 24.6 (2018): 731-738.; Barrett, David M et al., Toxicity management for patients receiving novel T-cell engaging therapies. Current opinion in pediatrics vol. 26.1 (2014): 43-9.; and Yoshika Iwata, et al., Different players generate positive responses in two in vitro cytokine assay formats with aqueous and immobilized TGN1412 analog. Biochemical and Biophysical Research Communications, vol 502, 1 (2018): 91-7). Considered in this way, it is inferred that pre-administration of Tocilizumab can suppress the increase in serum IL-6 associated with ERY974 administration by suppressing the secondary activation of immune cells in advance. If pre-administration of Tocilizumab can suppress the increase in serum IL-6 associated with ERY974 administration, it will be theoretically possible to reduce the concentration of Tocilizumab required to suppress CRS. Therefore, even at concentrations lower than the dose of Tocilizumab per administration in applications for treating CRS (8 mg/kg for patients weighing 30 kg or more, see Example 4-3), CRS suppression effect can be expected from pre-administration of Tocilizumab. Based on the above hypothesis, in the ERY102JP study, the optimal dose of Tocilizumab per administration (for example, a dose per administration is set to be lower than 8 mg/kg) is assumed to be examined by taking into consideration the serum concentration of Tocilizumab, IL-6 concentration, and AE report that are obtained after the start of the study.

### Example 5

### Pre-Administration of Tocilizumab in the Clinical Trials of ERY974

### (5-1) Outline and Purpose of the ERY102JP Study

[1091] The ERY102JP study is a phase I clinical trial targeting patients with Glypican-3 (GPC3)-positive advanced solid tumors, comprising single-agent administration of ERY974. This study is a single-center, open-label, dose-escalation study that has been designed for evaluating the safety, tolerability, pharmacokinetics, and antitumor effects when patients with GPC3-positive advanced/recurrent solid tumors are subjected to single-agent administration of ERY974 after pre-administration of Tocilizumab. Furthermore, this enables evaluation of the safety, efficacy, and pharmacokinetics of Tocilizumab as a preventive measure against CRS associated with ERY974 administration.

[1092] The number of subjects scheduled to participate in this clinical trial is 15 to 30 (3 to 6 in each cohort, 5 cohorts in total) at the initial stage of preparing the clinical trial protocol, but the results of examining this clinical trial and results of overseas clinical trials and such may lead to change in the method of administration of ERY974 and/or Tocilizumab, and change in the planned number of subjects, including those examined for specific carcinomas.

[1093] The primary objective of this study is to evaluate the safety and tolerability and confirm the pharmacokinetics, as well as to evaluate the dose limiting toxicity (DLT) and determine the maximum tolerated dose (MTD) by subjecting patients with GPC3-positive advanced/recurrent solid tumors to single-agent administration of ERY974 at doses (or administration methods) that differ for each cohort after pre-administration of Tocilizumab. In addition, as a secondary objective, the antitumor effect of single-agent administration of ERY974 after pre-administration of Tocilizumab in patients with GPC3-positive advanced/recurrent solid tumors, is evaluated. Furthermore, for exploratory purposes, the evaluation of cytokines and pharmacodynamic markers, and association with disease status, safety, and antitumor effect resulting from single-agent administration of ERY974 after pre-administration of Tocilizumab in patients with GPC3-positive advanced/recurrent solid tumors are examined, and the safety, efficacy and pharmacodynamics of Tocilizumab as an agent to be pre-administered relative to ERY974 are confirmed.

### (5-2) Dose of ERY974

[1094] In this study, ERY974 is administered intravenously at a dose per administration indicated in Table 12 shown below at intervals of once every week (QW) until the administration is judged to be ineffective or an unacceptable adverse event manifests. In this study, in principle, the dose of ERY974 per administration shall not be changed, but if clinically necessary due to development of adverse events and the like, the dose may be reduced at the discretion of the clinical trial investigator.

TABLE 12
Doses of ERY974

| Cohort | Dose of ERY974 |
|---|---|
| Cohort 1 | 0.12 μg/kg |
| Cohort 2 | 0.24 μg/kg |
| Cohort 3 | 0.50 μg/kg |
| Cohort 4 | 0.80 μg/kg |
| Cohort 5 | 1.20 μg/kg |

[1095] The intravenous administration of ERY974 is performed in three hours, and then flush with physiological saline solution is performed in one hour. If the clinical trial investigator judges that there is no problem regarding the safety of the subject, the administration duration of ERY974 can be shortened to a minimum of one hour.

### (5-3) Pre-Administration of Tocilizumab

[1096] All subjects receive a dose of Tocilizumab per administration, as shown in Table 13 below, by intravenous administration over a course of one hour, before the first administration of ERY974 (Cycle 1 Day 1). Administration of Tocilizumab is to be terminated no later than two hours before the start of ERY974 administration.

TABLE 13
Doses of Tocilizumab

| | |
|---|---|
| When the body weight is 30 kg or more | Tocilizumab at 8 mg/kg |
| When the body weight is less than 30 kg | Tocilizumab at 12 mg/kg |

[1097] In subjects who manifest cytokine release syndrome (CRS) or an event judged to suggest CRS associated with ERY974 administration in the first (cycle 1) administration of ERY974, administration of Tocilizumab before ERY974 at the doses shown in Table 13 above is tolerated even in the second (cycle 2) or subsequent ERY974 administrations.

[1098] If, with advancement of the study, the trial sponsor decides that pre-administration of Tocilizumab is required even at the second (cycle 2) or subsequent administrations of ERY974 when proceeding to the next cohort (that is, when increasing the dose of ERY974), the study is designed to be such that for the cohort and beyond, pre-administration of Tocilizumab can be made required for the second and subsequent designated ERY974 administrations in addition to the first ERY974 administration.

(5-4) Use of Tocilizumab and/or Steroids for the Treatment of CRS
In this Study, if CRS or an Event Judged to Suggest CRS is Observed after ERY974 administration, therapeutic administration of Tocilizumab and/or systemic corticosteroids is allowed. The dose in this case should be in accordance with Table 13 shown above. If multiple doses of Tocilizumab are required for CRS treatment purposes, the intervals after the previous Tocilizumab administration have to be eight hours or more, and in principle, the number of administrations of Tocilizumab with respect to one ERY974 administration is up to a maximum of four administrations including the pre-administration, while five or more administrations are allowed in limited cases where the clinical trial investigator decides that it is necessary upon sufficiently examining the medical needs and risks.

### (5-5) DLT Evaluation

[1099] In the ERY102JP study, one cycle is 7 days, and 28 days spanning from the first (cycle 1 Day 1) administration of ERY974 to the day before the fifth (cycle 5 Day 1) administration of ERY974 (+3 days if the administration is postponed within the permissible range) is regarded as the DLT evaluation period. If the administration of ERY974 is postponed, the DLT evaluation period is extended, but the maximum DLT evaluation period shall not exceed 42 days (+3 days if the administration is postponed within the permissible range). Among the adverse events manifested during the DLT evaluation period, the events for which a predetermined causal relationship with the ERY974 cannot be ruled out are defined as DLT. Regarding non-hematologic toxicity other than hepatotoxicity as the main DLT event, the toxicity rated as Grade 3 or higher as specified in CTCAE ver.5.0 (Table 7), for which a causal relationship with ERY974 administration cannot be ruled out, is defined as DLT; however, regarding CRS, even if it is Grade 3 or higher, it is not defined as DLT if it improves or recovers to Grade 1 or lower within three days by appropriate treatment.

[1100] To confirm the tolerability of ERY974, three to six subjects are enrolled in each cohort to perform a DLT evaluation, and based on the DLT manifestation status observed during the DLT evaluation period, the clinical trial investigator and sponsor decide, upon discussion, whether or not to proceed to the next ERY974 dose-stage cohort. The maximum dose at which the rate of DLT manifestation becomes less than 33% is defined as MTD.

### Example 6

### Evaluation Items and Evaluation Results in the ERY102JP Study

### (6-1) Main Analysis

[1101] The main analysis of this clinical trial are carried out by the following procedure.

[1102] Safety

[1103] Development of adverse event (AE), and development of dose-limiting toxicity (DLT) are assessed for each cohort, and the clinical test values and vital signs of the subjects are observed. For AE, particularly regarding CRS, the development frequency and severity (Grade) of CRS in each cohort are evaluated.

[1104] Pharmacokinetics

[1105] Plasma ERY974 concentration and serum Tocilizumab concentration of each of the subjects are observed over time, and evaluation and comparison are carried out for each cohort. In addition, the pharmacokinetic parameters of ERY974 and Tocilizumab (AUC, Cmax, Tmax, etc.) are calculated, and the effects of anti-ERY974 antibody and anti-Tocilizumab antibody on their respective pharmacokinetics are evaluated.

[1106] Efficacy (Anti-Tumor Effect)

[1107] In determination of the antitumor effect of ERY974, that is, the tumor response, based on RECIST v1.1, and the overall response rate (ORR), disease control rate (DCR), progression-free survival (PFS), and the duration of response (DoR) are determined.

### (6-2) Expected Results and Beneficial Effects

[1108] Pre-administration of Tocilizumab prevents or alleviates the development of CRS associated with ERY974 administration. In the ERY101EG study (without pre-administration of Tocilizumab), all three subjects enrolled in cohort 10A evaluated on the Fixed Day 1 regimen developed CRS (Grade 2 or 3) after administration of ERY974 at the target dose of 0.81 μg/kg, and required postponement or dose reduction of ERY974 administration (see Example 2-2). However, in the ERY102JP study in which Tocilizumab is pre-administered, it can be confirmed that even if ERY974 is administered at a dose of 0.80 μg/kg (cohort 4) or higher, CRS which is Grade 3 or higher and requires discontinuation of ERY974 administration does not develop. This can confirm that the pre-administration of Tocilizumab is effective in preventing or alleviating CRS associated with ERY974 administration. In addition, the effectiveness of pre-administration of Tocilizumab in preventing or alleviating CRS associated with ERY974 administration allows a dose of ERY974 per administration to be increased, and allows continuous administration at this dose until the administration is judged to be ineffective, or until an unacceptable adverse event other than CRS manifests. This makes it possible to administer a dose of ERY974 capable of exerting sufficient antitumor effects to a patient without causing serious CRS. In another aspect, when a pharmaceutical agent predicted to develop CRS is administered to a patient, the patient must usually be hospitalized and managed after the pharmaceutical agent is administered, but if Tocilizumab is pre-administered, hospitalization for management of the patient after ERY974 administration will become unnecessary, and this may contribute to improving the QOL of patients.

(6-3) One Embodiment of ERY974 and Tocilizumab after Approval

[1109] Although the embodiment is not limited, ERY974 is used in combination with Tocilizumab, and in the combination therapy, Tocilizumab is administered to an individual before or simultaneously with ERY974 administration. In one embodiment, Tocilizumab is administered 6 days, 5 days, 4 days, 3 days, 2 days, or 1 day before, or on the same day as but before administration of ERY974. Alternatively, Tocilizumab may be administered simultaneously with ERY974 on the day of ERY974 administration. At this time, a pharmaceutical composition comprising ERY974 may further contain a document instructing to use a cytokine inhibitor in combination. In addition, a pharmaceutical composition comprising Tocilizumab may further comprise a document instructing to use an anti-T cell antigen binding molecule in combination.

### Example 7

### Effect of Pre- and Post-Administration of Anti-Mouse IL6 Receptor Antibody (MR-16-1) on the Drug Efficacy of ERY974 Surrogate Antibody (GC33/2C11)

### (7-1) Pre-Administration of Anti-Mouse IL6 Receptor Antibody (MR-16-1)

[1110] In a test using a syngeneic mouse model, a study for evaluating the effect of pre-administration of an anti-mouse IL6 receptor antibody, MR-16-1 (see Okazaki M, et al., Characterization of anti-mouse interleukin-6 receptor antibody, Immunol Lett. 2002 Dec. 3; 84(3):231-40; and Saito T, et al., Preparation of soluble murine IL-6 receptor and anti-murine IL-6 receptor antibodies, J. Immunol., 47 (1991), pp. 168-173), on the drug efficacy of ERY974 surrogate antibodies was carried out as follows. Hepa1-6/hGPC3 cancer cells, which are mouse cancer cell line Hepa1-6 made to highly express human GPC3, were transplanted subcutaneously in C57BL/6 mice. The day of transplantation was set to day 0. On day 18, grouping was performed according to tumor size and body weight. The group settings are as shown in Table 14. MR-16-1 was administered into the tail vein at 30 mg/kg on day 18. On day 19, the day after MR-16-1 administration, GC33/2C11 was administered into the tail vein at 0.2 and 5 mg/kg. MR-16-1 was administered six times in total (on days 18, 21, 25, 28, 32 and day 35). GC33/2C11 was administered once, only on day 19. GC33/2C11 was an antibody comprising the amino acid sequence of SEQ ID NO: 443 as the GPC3-side heavy chain, the amino acid sequence of SEQ ID NO: 444 as the GPC3-side light chain, the amino acid sequence of SEQ ID NO: 445 as the CD3-side heavy chain, and the amino acid sequence of SEQ ID NO: 446 as the CD3-side light chain.

[1111] As a result, pre-administration of MR16-1 did not inhibit the drug efficacy of GC33/2C11. (Table 14) (FIG. 12)

TABLE 14

| | Dose of the administered pharmaceutical | | Day of administration of | Antitumor |
|---|---|---|---|---|
| Group | agent (mg/kg) | | the pharmaceutical agent | activity (%) |
| 1 | solvent | not applicable | day 19, 21, 25, 28, 32, 35 | not applicable |
| 2 | GC33/2C11 | 0.2 | day 19 | 80 |
| 3 | GC33/2C11 | 5 | day 19 | 110 |
| 4 | MR-16-1 | 30 (first administration), | day 18, 21, 25, 28, 32, 35 | −10 |
| | | 15 (second and subsequent | | |
| | | administrations) | | |
| 5 | GC33/2C11 | 0.2 | day 19 | 99 |
| | MR-16-1 | 30 (first administration), | day 18, 21, 25, 28, 32, 35 | |
| | | 15 (second and subsequent | | |
| | | administrations) | | |
| 6 | GC33/2C12 | 5 | day 19 | 107 |
| | MR-16-1 | 30 (first administration), | day 18, 21, 25, 28, 32, 35 | |
| | | 15 (second and subsequent | | |
| | | administrations) | | |

### (7-2) Post-Administration of Anti-Mouse IL6 Receptor Antibody (MR-16-1)

[1112] In a study using a syngeneic mouse model, a study for evaluating the effect of post-administration of an anti-mouse IL6 receptor antibody, MR-16-1, on the drug efficacy of ERY974 surrogate antibodies was carried out as follows. Hepa1-6/hGPC3 cancer cells, which are mouse cancer cell line Hepa1-6 made to highly express human GPC3, were transplanted subcutaneously in C57BL/6 mice. The day of transplantation was set to day 0. On day 16, grouping was performed according to tumor size and body weight. The group settings are as shown in Table 15. On day 17, GC33/2C11 was first administered into the tail vein at 0.2 or 5 mg/kg, and two hours later, MR-16-1 was administered into the tail vein at 30 mg/kg. MR-16-1 was administered six times in total (on days 17, 21, 24, 28, 31, and day 35). GC33/2C11 was administered once, only on day 17.

[1113] As a result, post-administration of MR16-1 did not inhibit the drug efficacy of GC33/2C11. (Table 15) (FIG. 13)

TABLE 15

| | Dose of the administered pharmaceutical | | Day of administration of the | Antitumor |
|---|---|---|---|---|
| Group | agent (mg/kg) | | pharmaceutical agent | activity (%) |
| 1 | solvent | not applicable | day 17, 21, 24, 28, 31, 35 | not applicable |
| 2 | GC33/2C11 | 0.2 | day 17 | 102 |
| 3 | GC33/2C11 | 5 | day 17 | 109 |
| 4 | MR-16-1 | 30 (first administration), | day 17, 21, 24, 28, 31, 35 | 23 |
| | | 15 (second and subsequent | | |
| | | administrations) | | |
| 5 | GC33/2C11 | 0.2 | day 17 | 103 |
| | | | (2 hours before MR-16-1 administration) | |
| | MR-16-1 | 30 (first administration), | day 17, 21, 24, 28, 31, 35 | |
| | | 15 (second and subsequent | | |
| | | administrations) | | |
| 6 | GC33/2C12 | 5 | day 17 | 109 |
| | | | (2 hours before MR-16-1 administration) | |
| | MR-16-1 | 30 (first administration), | day 17, 21, 24, 28, 31, 35 | |
| | | 15 (second and subsequent | | |
| | | administrations) | | |

### INDUSTRIAL APPLICABILITY

[1114] The present disclosure is useful for preventing, alleviating, or treating adverse reactions caused by cytokine production associated with administration of anti-T cell antigen-binding molecules. Anti-T cell antigen-binding molecules are drawing attention as means for treating cancer. Therefore, in some embodiments, the present disclosure is useful in treatment of cancer with anti-T cell antigen-binding molecules.

1. A method of preventing, alleviating, and/or treating cytokine release syndrome or treating cancer comprising administering an anti-T cell antigen-binding molecule to a subject in combination therapy with a cytokine inhibitor.

2. The method of claim 1, wherein the cytokine inhibitor is administered before, simultaneously with, or after administration of the anti-T cell antigen-binding molecule.

3. The method of claim 1, wherein the cytokine inhibitor is administered before or simultaneously with the administration of the anti-T cell antigen-binding molecule.

4. The method of claim 1, wherein the cytokine inhibitor is administered 6 days, 5 days, 4 days, 3 days, 2 days, or 1 day before the administration of the anti-T cell antigen-binding molecule, or on the same day as but before said administration.

5. The method of claim 1, wherein the cytokine inhibitor is further administered on the same day as, or 1 day, 2 days, 3 days, 4 days, 5 days, or 6 days after the administration of the anti-T cell antigen-binding molecule.

6. The method of claim 1, wherein the cytokine inhibitor is further administered when cytokine release syndrome (CRS) or signs of CRS develop after the administration of the anti-T cell antigen-binding molecule.

7. The method of claim 6, wherein the CRS is Grade 2 CRS or higher or Grade 3 CRS or higher.

8. The method of claim 1, wherein the cytokine inhibitor is administered after the administration of the anti-T cell antigen-binding molecule.

9. The method of claim 1, wherein the cytokine inhibitor is administered when CRS or signs of CRS develop after the administration of the anti-T cell antigen-binding molecule.

10. The method of claim 8, wherein the CRS is Grade 2 CRS or higher or Grade 3 CRS or higher.

11. The method of claim 1, wherein the cytokine inhibitor is an inhibitor of one or more cytokines selected from IL-1β, IL-2, IL-4, IL-5, IL-6, IL-8, IL-10, IL-12, IL-13, IL-15, IL-17, IL-1Ra, IL-2R, IFN-α, IFN-γ, MIP-1α, MIP-1β, MCP-1, TNFα, GM-CSF, G-CSF, CXCL9, CXCL10, CXCR factor, VEGF, RANTES, eotaxin, EGF, HGF, FGF-β, CD30, CD30L, CD40, CD40L, ferritin, and RAGE.

12. The method of claim 1, wherein the cytokine inhibitor is an anti-IL6R antibody.

13. The method of claim 1, wherein the cytokine inhibitor is Tocilizumab, and wherein Tocilizumab is administered at 8 mg/kg or less per dose for a patient weighing 30 kg or more and at 12 mg/kg or less per dose for a patient weighing less than 30 kg.

14. The method of claim 1, wherein a corticosteroid is not administered before or simultaneously with the administration of the anti-T cell antigen-binding molecule.

15. The method of claim 1, wherein a corticosteroid is further administered before, simultaneously with, or after the administration of the anti-T cell antigen-binding molecule.

16. The method of claim 1, wherein the method is for preventing, alleviating, and/or treating cytokine release syndrome.

17. The method of claim 1, wherein the method is for treating cancer.

18. The method of claim 1, wherein the anti-T cell antigen-binding molecule is multispecific.

19. A pharmaceutical composition comprising an anti-T cell antigen-binding molecule and a cytokine inhibitor.

The application's sequence listing, which the Patent Office published only in electronic form, follows.

SEQUENCE LISTING (446 sequences)

SEQ ID NO: 1 - DNA, 2398 bp, Homo sapiens
agccccgccctgccccgcgccgccaagcggttcccgccctcgcccagcgcccaggtagctgcgaggaaacttttgcagcggctgggtagcagcacgtctcttgctcctcagggccactgccaggcttgccgagtcctgggactgctctcgctccggctgccactctcccgcgctctcctagctccctgcgaagcaggatggccgggaccgtgcgcaccgcgtgcttggtggtggcgatgctgctcagcttggacttcccgggacaggcgcagcccccgccgccgccgccggacgccacctgtcaccaagtccgctccttcttccagagactgcagcccggactcaagtgggtgccagaaactcccgtgccaggatcagatttgcaagtatgtctccctaagggcccaacatgctgctcaagaaagatggaagaaaaataccaactaacagcacgattgaacatggaacagctgcttcagtctgcaagtatggagctcaagttcttaattattcagaatgctgcggttttccaagaggcctttgaaattgttgttcgccatgccaagaactacaccaatgccatgttcaagaacaactacccaagcctgactccacaagcttttgagtttgtgggtgaatttttcacagatgtgtctctctacatcttgggttctgacatcaatgtagatgacatggtcaatgaattgtttgacagcctgtttccagtcatctatacccagctaatgaacccaggcctgcctgattcagccttggacatcaatgagtgcctccgaggagcaagacgtgacctgaaagtatttgggaatttccccaagcttattatgacccaggtttccaagtcactgcaagtcactaggatcttccttcaggctctgaatcttggaattgaagtgatcaacacaactgatcacctgaagttcagtaaggactgtggccgaatgctcaccagaatgtggtactgctcttactgccagggactgatgatggttaaaccctgtggcggttactgcaatgtggtcatgcaaggctgtatggcaggtgtggtggagattgacaagtactggagagaatacattctgtcccttgaagaacttgtgaatggcatgtacagaatctatgacatggagaacgtactgcttggtctcttttcaacaatccatgattctatccagtatgtccagaagaatgcaggaaagctgaccaccactgaaactgagaagaaaatatggcacttcaaatatcctatcttcttcctgtgtatagggctagacttacagattggcaagttatgtgcccattctcaacaacgccaatatagatctgcttattatcctgaagatctctttattgacaagaaagtattaaaagttgctcatgtagaacatgaagaaaccttatccagccgaagaagggaactaattcagaagttgaagtctttcatcagcttctatagtgctttgcctggctacatctgcagccatagccctgtggcggaaaacgacaccctttgctggaatggacaagaactcgtggagagatacagccaaaaggcagcaaggaatggaatgaaaaaccagttcaatctccatgagctgaaaatgaagggccctgagccagtggtcagtcaaattattgacaaactgaagcacattaaccagctcctgagaaccatgtctatgcccaaaggtagagttctggataaaaacctggatgaggaagggtttgaaagtggagactgcggtgatgatgaagatgagtgcattggaggctctggtgatggaatgataaaagtgaagaatcagctccgcttccttgcagaactggcctatgatctggatgtggatgatgcgcctggaaacagtcagcaggcaactccgaaggacaacgagataagcacctttcacaacctcgggaacgttcattccccgctgaagcttctcaccagcatggccatctcggtggtgtgcttcttcttcctggtgcactgactgcctggtgcccagcacatgtgctgccctacagcaccctgtggtcttcctcgataaagggaaccactttcttatttttttctatttttttttttttgttatcctgtatacctcctccagccatgaagtagaggactaaccatgtgttatgttttcgaaaatcaaatggtatcttttggaggaagatacattttagtggtagcatatagattgtccttttgcaaagaaagaaaaaaaaccatcaagttgtgccaaattattctcctatgtttggctgctagaacatggttaccatgtctttctctctcactccctccctttctatcgttctctctttgcatggatttctttgaaaaaaaataaattgctcaaataaaaaaaaaaaaaaa

SEQ ID NO: 2 - protein, 603 aa, Homo sapiens
MAGTVRTACLVVAMLLSLDFPGQAQPPPPPPDATCHQVRSFFQRLQPGLKWVPETPVPGSDLQVCLPKGPTCCSRKMEEKYQLTARLNMEQLLQSASMELKFLIIQNAAVFQEAFEIVVRHAKNYTNAMFKNNYPSLTPQAFEFVGEFFTDVSLYILGSDINVDDMVNELFDSLFPVIYTQLMNPGLPDSALDINECLRGARRDLKVFGNFPKLIMTQVSKSLQVTRIFLQALNLGIEVINTTDHLKFSKDCGRMLTRMWYCSYCQGLMMVKPCGGYCNVVMQGCMAGVVEIDKYWREYILSLEELVNGMYRIYDMENVLLGLFSTIHDSIQYVQKNAGKLTTTETEKKIWHFKYPIFFLCIGLDLQIGKLCAHSQQRQYRSAYYPEDLFIDKKVLKVAHVEHEETLSSRRRELIQKLKSFISFYSALPGYICSHSPVAENDTLCWNGQELVERYSQKAARNGMKNQFNLHELKMKGPEPVVSQIIDKLKHINQLLRTMSMPKGRVLDKNLDEEGFESGDCGDDEDECIGGSGDGMIKVKNQLRFLAELAYDLDVDDAPGNSQQATPKDNEISTFHNLGNVHSPLKLLTSMAISVVCFFFLVH

SEQ ID NO: 3 - protein, 19 aa, Artificial
  An artificially generated sequence
MGWSCIILFLVATATGVHS

SEQ ID NO: 4 - protein, 141 aa, Homo sapiens
DIQNPDPAVYQLRDSKSSDKSVCLFTDFDSQTNVSQSKDSDVYITDKTVLDMRSMDFKSNSAVAWSNKSDFACANAFNNSIIPEDTFFPSPESSCDVKLVEKSFETDTNLNFQNLSVIGFRILLLKVAGFNLLMTLRLWSS

SEQ ID NO: 5 - protein, 179 aa, Homo sapiens
EDLKNVFPPEVAVFEPSEAEISHTQKATLVCLATGFYPDHVELSWWVNGKEVHSGVSTDPQPLKEQPALNDSRYCLSSRLRVSATFWQNPRNHFRCQVQFYGLSENDEWTQDRAKPVTQIVSAEAWGRADCGFTSESYQQGVLSATILYEILLGKATLYAVLVSALVLMAMVKRKDSRG

SEQ ID NO: 6 - protein, 173 aa, Homo sapiens
DKQLDADVSPKPTIFLPSIAETKLQKAGTYLCLLEKFFPDVIKIHWQEKKSNTILGSQEGNTMKTNDTYMKFSWLTVPEKSLDKEHRCIVRHENNKNGVDQEIIFPPIKTDVITMDPKDNCSKDANDTLLLQLTNTSAYYMYLLLLLKSVVYFAIITCCLLRRTAFCCNGEKS

SEQ ID NO: 7 - protein, 204 aa, Homo sapiens
KQLDADVSPKPTIFLPSIAETKLQKAGTYLCLLEKFFPDIIKIHWQEKKSNTILGSQEGNTMKTNDTYMKFSWLTVPEESLDKEHRCIVRHENNKNGIDQEIIFPPIKTDVTTVDPKDSYSKDANDVTTVDPKYNYSKDANDVITMDPKDNWSKDANDTLLLQLTNTSAYYMYLLLLLKSVVYFAIITCCLLGRTAFCCNGEKS

SEQ ID NO: 8 - protein, 177 aa, Homo sapiens
PSYTGGYADKLIFGKGTRVTVEPRSQPHTKPSVFVMKNGTNVACLVKEFYPKDIRINLVSSKKITEFDPAIVISPSGKYNAVKLGKYEDSNSVTCSVQHDNKTVHSTDFEVKTDSTDHVKPKETENTKQPSKSCHKPKAIVHTEKVNMMSLTVLGLRMLFAKTVAVNFLLTAKLFFL

SEQ ID NO: 9 - DNA, 1311 bp, Homo sapiens
agtctagctgctgcacaggctggctggctggctggctgctaagggctgctccacgcttttgccggaggacagagactgacatggaacaggggaagggcctggctgtcctcatcctggctatcattcttcttcaaggtactttggcccagtcaatcaaaggaaaccacttggttaaggtgtatgactatcaagaagatggttcggtacttctgacttgtgatgcagaagccaaaaatatcacatggtttaaagatgggaagatgatcggcttcctaactgaagataaaaaaaaatggaatctgggaagtaatgccaaggaccctcgagggatgtatcagtgtaaaggatcacagaacaagtcaaaaccactccaagtgtattacagaatgtgtcagaactgcattgaactaaatgcagccaccatatctggctttctctttgctgaaatcgtcagcattttcgtccttgctgttggggtctacttcattgctggacaggatggagttcgccagtcgagagcttcagacaagcagactctgttgcccaatgaccagctctaccagcccctcaaggatcgagaagatgaccagtacagccaccttcaaggaaaccagttgaggaggaattgaactcaggactcagagtagtccaggtgttctcctcctattcagttcccagaatcaaagcaatgcattttggaaagctcctagcagagagactttcagccctaaatctagactcaaggttcccagagatgacaaatggagaagaaaggccatcagagcaaatttgggggtttctcaaataaaataaaaataaaaacaaatactgtgtttcagaagcgccacctattggggaaaattgtaaaagaaaaatgaaaagatcaaataaccccctggatttgaatataattttttgtgttgtaatttttatttcgtttttgtataggttataattcacatggctcaaatattcagtgaaagctctccctccaccgccatcccctgctacccagtgaccctgttgccctcttcagagacaaattagtttctcttttttttttttttttttttttttttgagacagtctggctctgtcacccaggctgaaatgcagtggcaccatctcggctcactgcaacctctgcctcctgggttcaagcgattctcctgcctcagcctcccgggcagctgggattacaggcacacactaccacacctggctaatttttgtatttttagtagagacagggttttgctctgttggccaagctggtctcgaactcctgacctcaagtgatccgcccgcctc

SEQ ID NO: 10 - DNA, 771 bp, Homo sapiens
agagaagcagacatcttctagttcctcccccactctcctctttccggtacctgtgagtcagctaggggagggcagctctcacccaggctgatagttcggtgacctggctttatctactggatgagttccgctgggagatggaacatagcacgtttctctctggcctggtactggctacccttctctcgcaagtgagccccttcaagatacctatagaggaacttgaggacagagtgtttgtgaattgcaataccagcatcacatgggtagagggaacggtgggaacactgctctcagacattacaagactggacctgggaaaacgcatcctggacccacgaggaatatataggtgtaatgggacagatatatacaaggacaaagaatctaccgtgcaagttcattatcgaatgtgccagagctgtgtggagctggatccagccaccgtggctggcatcattgtcactgatgtcattgccactctgctccttgctttgggagtcttctgctttgctggacatgagactggaaggctgtctggggctgccgacacacaagctctgttgaggaatgaccaggtctatcagcccctccgagatcgagatgatgctcagtacagccaccttggaggaaactgggctcggaacaagtgaacctgagactggtggcttctagaagcagccattaccaactgtaccttcccttcttgctcagccaataaatatatcctctttcactcagaaaaaaaaaaaaaaaaaaaaaaaaaaaaaa

SEQ ID NO: 11 - DNA, 1534 bp, Homo sapiens
tattgtcagagtcctcttgtttggccttctaggaaggctgtgggacccagctttcttcaaccagtccaggtggaggcctctgccttgaacgtttccaagtgaggtaaaacccgcaggcccagaggcctctctacttcctgtgtggggttcagaaaccctcctcccctcccagcctcaggtgcctgcttcagaaaatgaagtagtaagtctgctggcctccgccatcttagtaaagtaacagtcccatgaaacaaagatgcagtcgggcactcactggagagttctgggcctctgcctcttatcagttggcgtttgggggcaagatggtaatgaagaaatgggtggtattacacagacaccatataaagtctccatctctggaaccacagtaatattgacatgccctcagtatcctggatctgaaatactatggcaacacaatgataaaaacataggcggtgatgaggatgataaaaacataggcagtgatgaggatcacctgtcactgaaggaattttcagaattggagcaaagtggttattatgtctgctaccccagaggaagcaaaccagaagatgcgaacttttatctctacctgagggcaagagtgtgtgagaactgcatggagatggatgtgatgtcggtggccacaattgtcatagtggacatctgcatcactgggggcttgctgctgctggtttactactggagcaagaatagaaaggccaaggccaagcctgtgacacgaggagcgggtgctggcggcaggcaaaggggacaaaacaaggagaggccaccacctgttcccaacccagactatgagcccatccggaaaggccagcgggacctgtattctggcctgaatcagagacgcatctgaccctctggagaacactgcctcccgctggcccaggtctcctctccagtccccctgcgactccctgtttcctgggctagtcttggaccccacgagagagaatcgttcctcagcctcatggtgaactcgcgccctccagcctgatcccccgctccctcctccctgccttctctgctggtacccagtcctaaaatattgctgcttcctcttcctttgaagcatcatcagtagtcacaccctcacagctggcctgccctcttgccaggatatttatttgtgctattcactcccttccctttggatgtaacttctccgttcagttccctccttttcttgcatgtaagttgtcccccatcccaaagtattccatctacttttctatcgccgtccccttttgcagccctctctggggatggactgggtaaatgttgacagaggccctgccccgttcacagatcctggccctgagccagccctgtgctcctccctcccccaacactccctaccaaccccctaatcccctactccctccaccccccctccactgtaggccactggatggtcatttgcatctccgtaaatgtgctctgctcctcagctgagagagaaaaaaataaactgtatttggctgcaagaaaaaaaaaaaaaaaaaaaaaa

SEQ ID NO: 12 - protein, 182 aa, Homo sapiens
MEQGKGLAVLILAIILLQGTLAQSIKGNHLVKVYDYQEDGSVLLTCDAEAKNITWFKDGKMIGFLTEDKKKWNLGSNAKDPRGMYQCKGSQNKSKPLQVYYRMCQNCIELNAATISGFLFAEIVSIFVLAVGVYFIAGQDGVRQSRASDKQTLLPNDQLYQPLKDREDDQYSHLQGNQLRRN

SEQ ID NO: 13 - protein, 171 aa, Homo sapiens
MEHSTFLSGLVLATLLSQVSPFKIPIEELEDRVFVNCNTSITWVEGTVGTLLSDITRLDLGKRILDPRGIYRCNGTDIYKDKESTVQVHYRMCQSCVELDPATVAGIIVTDVIATLLLALGVFCFAGHETGRLSGAADTQALLRNDQVYQPLRDRDDAQYSHLGGNWARNK

SEQ ID NO: 14 - protein, 207 aa, Homo sapiens
MQSGTHWRVLGLCLLSVGVWGQDGNEEMGGITQTPYKVSISGTTVILTCPQYPGSEILWQHNDKNIGGDEDDKNIGSDEDHLSLKEFSELEQSGYYVCYPRGSKPEDANFYLYLRARVCENCMEMDVMSVATIVIVDICITGGLLLLVYYWSKNRKAKAKPVTRGAGAGGRQRGQNKERPPPVPNPDYEPIRKGQRDLYSGLNQRRI

SEQ ID NO: 15 - protein, 4 aa, Artificial
  An artificially generated sequence
GGGS

SEQ ID NO: 16 - protein, 4 aa, Artificial
  An artificially generated sequence
SGGG

SEQ ID NO: 17 - protein, 5 aa, Artificial
  An artificially generated sequence
GGGGS

SEQ ID NO: 18 - protein, 5 aa, Artificial
  An artificially generated sequence
SGGGG

SEQ ID NO: 19 - protein, 6 aa, Artificial
  An artificially generated sequence
GGGGGS

SEQ ID NO: 20 - protein, 6 aa, Artificial
  An artificially generated sequence
SGGGGG

SEQ ID NO: 21 - protein, 7 aa, Artificial
  An artificially generated sequence
GGGGGGS

SEQ ID NO: 22 - protein, 7 aa, Artificial
  An artificially generated sequence
SGGGGGG

SEQ ID NO: 23 - protein, 330 aa, Homo sapiens [sequence omitted]

SEQ ID NO: 24 - protein, 326 aa, Homo sapiens
ASTKGPSVFPLAPCSRSTSESTAALGCLVKDYFPEPVTVSWNSGALTSGVHTFPAVLQSSGLYSLSSVVTVPSSNFGTQTYTCNVDHKPSNTKVDKTVERKCCVECPPCPAPPVAGPSVFLFPPKPKDTLMISRTPEVTCVVVDVSHEDPEVQFNWYVDGVEVHNAKTKPREEQFNSTFRVVSVLTVVHQDWLNGKEYKCKVSNKGLPAPIEKTISKTKGQPREPQVYTLPPSREEMTKNQVSLTCLVKGFYPSDIAVEWESNGQPENNYKTTPPMLDSDGSFFLYSKLTVDKSRWQQGNVFSCSVMHEALHNHYTQKSLSLSPGK

SEQ ID NO: 25 - protein, 377 aa, Homo sapiens
ASTKGPSVFPLAPCSRSTSGGTAALGCLVKDYFPEPVTVSWNSGALTSGVHTFPAVLQSSGLYSLSSVVTVPSSSLGTQTYTCNVNHKPSNTKVDKRVELKTPLGDTTHTCPRCPEPKSCDTPPPCPRCPEPKSCDTPPPCPRCPEPKSCDTPPPCPRCPAPELLGGPSVFLFPPKPKDTLMISRTPEVTCVVVDVSHEDPEVQFKWYVDGVEVHNAKTKPREEQYNSTFRVVSVLTVLHQDWLNGKEYKCKVSNKALPAPIEKTISKTKGQPREPQVYTLPPSREEMTKNQVSLTCLVKGFYPSDIAVEWESSGQPENNYNTTPPMLDSDGSFFLYSKLTVDKSRWQQGNIFSCSVMHEALHNRFTQKSLSLSPGK

SEQ ID NO: 26 - protein, 327 aa, Homo sapiens
ASTKGPSVFPLAPCSRSTSESTAALGCLVKDYFPEPVTVSWNSGALTSGVHTFPAVLQSSGLYSLSSVVTVPSSSLGTKTYTCNVDHKPSNTKVDKRVESKYGPPCPSCPAPEFLGGPSVFLFPPKPKDTLMISRTPEVTCVVVDVSQEDPEVQFNWYVDGVEVHNAKTKPREEQFNSTYRVVSVLTVLHQDWLNGKEYKCKVSNKGLPSSIEKTISKAKGQPREPQVYTLPPSQEEMTKNQVSLTCLVKGFYPSDIAVEWESNGQPENNYKTTPPVLDSDGSFFLYSRLTVDKSRWQEGNVFSCSVMHEALHNHYTQKSLSLSLGK

SEQ ID NO: 27 - DNA, 2268 bp, Homo sapiens
aatatcttgcatgttacagatttcactgctcccaccagcttggagacaacatgtggttcttgacaactctgctcctttgggttccagttgatgggcaagtggacaccacaaaggcagtgatcactttgcagcctccatgggtcagcgtgttccaagaggaaaccgtaaccttgcactgtgaggtgctccatctgcctgggagcagctctacacagtggtttctcaatggcacagccactcagacctcgacccccagctacagaatcacctctgccagtgtcaatgacagtggtgaatacaggtgccagagaggtctctcagggcgaagtgaccccatacagctggaaatccacagaggctggctactactgcaggtctccagcagagtcttcacggaaggagaacctctggccttgaggtgtcatgcgtggaaggataagctggtgtacaatgtgctttactatcgaaatggcaaagcctttaagtttttccactggaattctaacctcaccattctgaaaaccaacataagtcacaatggcacctaccattgctcaggcatgggaaagcatcgctacacatcagcaggaatatctgtcactgtgaaagagctatttccagctccagtgctgaatgcatctgtgacatccccactcctggaggggaatctggtcaccctgagctgtgaaacaaagttgctcttgcagaggcctggtttgcagctttacttctccttctacatgggcagcaagaccctgcgaggcaggaacacatcctctgaataccaaatactaactgctagaagagaagactctgggttatactggtgcgaggctgccacagaggatggaaatgtccttaagcgcagccctgagttggagcttcaagtgcttggcctccagttaccaactcctgtctggtttcatgtccttttctatctggcagtgggaataatgtttttagtgaacactgttctctgggtgacaatacgtaaagaactgaaaagaaagaaaaagtgggatttagaaatctctttggattctggtcatgagaagaaggtaatttccagccttcaagaagacagacatttagaagaagagctgaaatgtcaggaacaaaaagaagaacagctgcaggaaggggtgcaccggaaggagccccagggggccacgtagcagcggctcagtgggtggccatcgatctggaccgtcccctgcccacttgctccccgtgagcactgcgtacaaacatccaaaagttcaacaacaccagaactgtgtgtctcatggtatgtaactcttaaagcaaataaatgaactgacttcaactgggatacatttggaaatgtggtcatcaaagatgacttgaaatgaggcctactctaaagaattcttgaaaaacttacaagtcaagcctagcctgataatcctattacatagtttgaaaaatagtattttatttctcagaacaaggtaaaaaggtgagtgggtgcatatgtacagaagattaagacagagaaacagacagaaagagacacacacacagccaggagtgggtagatttcagggagacaagagggaatagtatagacaataaggaaggaaatagtacttacaaatgactcctaagggactgtgagactgagagggctcacgcctctgtgttcaggatacttagttcatggcttttctctttgactttactaaaagagaatgtctccatacgcgttctaggcatacaagggggtaactcatgatgagaaatggatgtgttattcttgccctctcttttgaggctctctcataacccctctatttctagagacaacaaaaatgctgccagtcctaggcccctgccctgtaggaaggcagaatgtaactgttctgtttgtttaacgattaagtccaaatctccaagtgcggcactgcaaagagacgcttcaagtggggagaagcggcgataccatagagtccagatcttgcctccagagatttgctttaccttcctgattttctggttactaattagcttcaggatacgctgctctcatacttgggctgtagtttggagacaaaatattttcctgccactgtgtaacatagctgaggtaaaaactgaactatgtaaatgactctactaaaagtttagggaaaaaaaacaggaggagtatgacacaaaaaaaaaaaaaaaaaaaaaaaaaaaaaaaaaaaaaaaaaaaaaaaaaaaaaaaaaaaaaaaaaaaaaaaaaaaaaaaaaaaaaaaaaaaaa

SEQ ID NO: 28 - protein, 374 aa, Homo sapiens
MWFLTTLLLWVPVDGQVDTTKAVITLQPPWVSVFQEETVTLHCEVLHLPGSSSTQWFLNGTATQTSTPSYRITSASVNDSGEYRCQRGLSGRSDPIQLEIHRGWLLLQVSSRVFTEGEPLALRCHAWKDKLVYNVLYYRNGKAFKFFHWNSNLTILKTNISHNGTYHCSGMGKHRYTSAGISVTVKELFPAPVLNASVTSPLLEGNLVTLSCETKLLLQRPGLQLYFSFYMGSKTLRGRNTSSEYQILTARREDSGLYWCEAATEDGNVLKRSPELELQVLGLQLPTPVWFHVLFYLAVGIMFLVNTVLWVTIRKELKRKKKWDLEISLDSGHEKKVISSLQEDRHLEEELKCQEQKEEQLQEGVHRKEPQGAT

SEQ ID NO: 29 - DNA, 1396 bp, Homo sapiens
gggatgactatggagacccaaatgtctcagaatgtatgtcccagaaacctgtggctgcttcaaccattgacagttttgctgctgctggcttctgcagacagtcaagctgctcccccaaaggctgtgctgaaacttgagcccccgtggatcaacgtgctccaggaggactctgtgactctgacatgccagggggctcgcagccctgagagcgactccattcagtggttccacaatgggaatctcattcccacccacacgcagcccagctacaggttcaaggccaacaacaatgacagcggggagtacacgtgccagactggccagaccagcctcagcgaccctgtgcatctgactgtgctttccgaatggctggtgctccagacccctcacctggagttccaggagggagaaaccatcatgctgaggtgccacagctggaaggacaagcctctggtcaaggtcacattcttccagaatggaaaatcccagaaattctcccatttggatcccaccttctccatcccacaagcaaaccacagtcacagtggtgattaccactgcacaggaaacataggctacacgctgttctcatccaagcctgtgaccatcactgtccaagtgcccagcatgggcagctcttcaccaatgggggtcattgtggctgtggtcattgcgactgctgtagcagccattgttgctgctgtagtggccttgatctactgcaggaaaaagcggatttcagccaattccactgatcctgtgaaggctgcccaatttgagccacctggacgtcaaatgattgccatcagaaagagacaacttgaagaaaccaacaatgactatgaaacagctgacggcggctacatgactctgaaccccagggcacctactgacgatgataaaaacatctacctgactcttcctcccaacgaccatgtcaacagtaataactaaagagtaacgttatgccatgtggtcatactctcagcttgctgagtggatgacaaaaagaggggaattgttaaaggaaaatttaaatggagactggaaaaatcctgagcaaacaaaaccacctggcccttagaaatagctttaactttgcttaaactacaaacacaagcaaaacttcacggggtcatactacatacaagcataagcaaaacttaacttggatcatttctggtaaatgcttatgttagaaataagacaaccccagccaatcacaagcagcctactaacatataattaggtgactagggactttctaagaagatacctacccccaaaaaacaattatgtaattgaaaaccaaccgattgcctttattttgcttccacattttcccaataaatacttgcctgtgactaaaaaaaaaaaaaaaaaaaaaaaaaaaaaa

SEQ ID NO: 30 - protein, 316 aa, Homo sapiens
MTMETQMSQNVCPRNLWLLQPLTVLLLLASADSQAAPPKAVLKLEPPWINVLQEDSVTLTCQGARSPESDSIQWFHNGNLIPTHTQPSYRFKANNNDSGEYTCQTGQTSLSDPVHLTVLSEWLVLQTPHLEFQEGETIMLRCHSWKDKPLVKVTFFQNGKSQKFSHLDPTFSIPQANHSHSGDYHCTGNIGYTLFSSKPVTITVQVPSMGSSSPMGVIVAVVIATAVAAIVAAVVALIYCRKKRISANSTDPVKAAQFEPPGRQMIAIRKRQLEETNNDYETADGGYMTLNPRAPTDDDKNIYLTLPPNDHVNSNN

SEQ ID NO: 31 - DNA, 1497 bp, Homo sapiens
tgtgactgctgtgctctgggcgccagctcgctccagggagtgatgggaatcctgtcattcttacctgtccttgccactgagagtgactgggctgactgcaagtccccccagccttggggtcatatgcttctgtggacagctgtgctattcctggctcctgttgctgggacacctgcagctcccccaaaggctgtgctgaaactcgagccccagtggatcaacgtgctccaggaggactctgtgactctgacatgccgggggactcacagccctgagagcgactccattcagtggttccacaatgggaatctcattcccacccacacgcagcccagctacaggttcaaggccaacaacaatgacagcggggagtacacgtgccagactggccagaccagcctcagcgaccctgtgcatctgactgtgctttctgagtggctggtgctccagacccctcacctggagttccaggagggagaaaccatcgtgctgaggtgccacagctggaaggacaagcctctggtcaaggtcacattcttccagaatggaaaatccaagaaattttcccgttcggatcccaacttctccatcccacaagcaaaccacagtcacagtggtgattaccactgcacaggaaacataggctacacgctgtactcatccaagcctgtgaccatcactgtccaagctcccagctcttcaccgatggggatcattgtggctgtggtcactgggattgctgtagcggccattgttgctgctgtagtggccttgatctactgcaggaaaaagcggatttcagccaatcccactaatcctgatgaggctgacaaagttggggctgagaacacaatcacctattcacttctcatgcacccggatgctctggaagagcctgatgaccagaaccgtatttagtctccattgtcttgcattgggatttgagaagaaaatcagagagggaagatctggtatttcctggcctaaattccccttggggaggacagggagatgctgcagttccaaaagagaaggtttcttccagagtcatctacctgagtcctgaagctccctgtcctgaaagccacagacaatatggtcccaaataaccgactgcaccttctgtgcttcagctcttcttgacatcaaggctcttccgttccacatccacacagccaatccaattaatcaaaccactgttattaacagataatagcaacttgggaaatgcttatgttacaggttacgtgagaacaatcatgtaaatctatatgatttcagaaatgttaaaatagactaacctctaccagcacattaaaagtgattgtttctgggtgataaaattattgatgatttttattttctttatttttctataaagatcatatattacttttataataaaacattataaaaacaaaaaaaaaaaaaaaaaaaaaaaaaaaaaaaaaaaaaaaaaaaaaaaaaaaaaaaaaaaaaaaaaaaaaaaaaaaaaaa

SEQ ID NO: 32 - protein, 291 aa, Homo sapiens
MGILSFLPVLATESDWADCKSPQPWGHMLLWTAVLFLAPVAGTPAAPPKAVLKLEPQWINVLQEDSVTLTCRGTHSPESDSIQWFHNGNLIPTHTQPSYRFKANNNDSGEYTCQTGQTSLSDPVHLTVLSEWLVLQTPHLEFQEGETIVLRCHSWKDKPLVKVTFFQNGKSKKFSRSDPNFSIPQANHSHSGDYHCTGNIGYTLYSSKPVTITVQAPSSSPMGIIVAVVTGIAVAAIVAAVVALIYCRKKRISANPTNPDEADKVGAENTITYSLLMHPDALEEPDDQNRI

SEQ ID NO: 33 - DNA, 2137 bp, Homo sapiens
cttgtccactccagtgtggcatcatgtggcagctgctcctcccaactgctctgctacttctagtttcagctggcatgcggactgaagatctcccaaaggctgtggtgttcctggagcctcaatggtacagggtgctcgagaaggacagtgtgactctgaagtgccagggagcctactcccctgaggacaattccacacagtggtttcacaatgagagcctcatctcaagccaggcctcgagctacttcattgacgctgccacagttgacgacagtggagagtacaggtgccagacaaacctctccaccctcagtgacccggtgcagctagaagtccatatcggctggctgttgctccaggcccctcggtgggtgttcaaggaggaagaccctattcacctgaggtgtcacagctggaagaacactgctctgcataaggtcacatatttacagaatggcaaaggcaggaagtattttcatcataattctgacttctacattccaaaagccacactcaaagacagcggctcctacttctgcagggggcttgttgggagtaaaaatgtgtcttcagagactgtgaacatcaccatcactcaaggtttgtcagtgtcaaccatctcatcattctttccacctgggtaccaagtctctttctgcttggtgatggtactcctttttgcagtggacacaggactatatttctctgtgaagacaaacattcgaagctcaacaagagactggaaggaccataaatttaaatggagaaaggaccctcaagacaaatgacccccatcccatgggggtaataagagcagtagcagcagcatctctgaacatttctctggatttgcaaccccatcatcctcaggcctctctacaagcagcaggaaacatagaactcagagccagatcccttatccaactctcgacttttccttggtctccagtggaagggaaaagcccatgatcttcaagcagggaagccccagtgagtagctgcattcctagaaattgaagtttcagagctacacaaacactttttctgtcccaaccgttccctcacagcaaagcaacaatacaggctagggatggtaatcctttaaacatacaaaaattgctcgtgttataaattacccagtttagaggggaaaaaaaaacaattattcctaaataaatggataagtagaattaatggttgaggcaggaccatacagagtgtgggaactgctggggatctagggaattcagtgggaccaatgaaagcatggctgagaaatagcaggtagtccaggatagtctaagggaggtgttcccatctgagcccagagataagggtgtcttcctagaacattagccgtagtggaattaacaggaaatcatgagggtgacgtagaattgagtcttccaggggactctatcagaactggaccatctccaagtatataacgatgagtcctcttaatgctaggagtagaaaatggtcctaggaaggggactgaggattgcggtggggggtggggtggaaaagaaagtacagaacaaaccctgtgtcactgtcccaagttgctaagtgaacagaactatctcagcatcagaatgagaaagcctgagaagaaagaaccaaccacaagcacacaggaaggaaagcgcaggaggtgaaaatgctttcttggccagggtagtaagaattagaggttaatgcagggactgtaaaaccaccttttctgcttcaatatctaattcctgtgtagctttgttcattgcatttattaaacaaatgttgtataaccaatactaaatgtactactgagcttcgctgagttaagttatgaaactttcaaatccttcatcatgtcagttccaatgaggtggggatggagaagacaattgttgcttatgaaagaaagctttagctgtctctgttttgtaagctttaagcgcaacatttcttggttccaataaagcattttacaagatcttgcatgctactcttagatagaagatgggaaaaccatggtaataaaatatgaatgataaaaaaaaaaaaaaaaaaaaaaaaaaaaaaaaaaaaaaaaaaaaaaaaaaaaaaaaaaaaaaaaaaaaaaaaaaaaaaaaaaaaaaaaaaaaaaaaaaaa

SEQ ID NO: 34 - protein, 254 aa, Homo sapiens [sequence omitted]

SEQ ID NO: 35 - DNA, 820 bp, Homo sapiens
cactccagtgtggcatcatgtggcagctgctcctcccaactgctctgctacttctagtttcagctggcatgcggactgaagatctcccaaaggctgtggtgttcctggagcctcaatggtacagcgtgcttgagaaggacagtgtgactctgaagtgccagggagcctactcccctgaggacaattccacacagtggtttcacaatgagagcctcatctcaagccaggcctcgagctacttcattgacgctgccacagtcaacgacagtggagagtacaggtgccagacaaacctctccaccctcagtgacccggtgcagctagaagtccatatcggctggctgttgctccaggcccctcggtgggtgttcaaggaggaagaccctattcacctgaggtgtcacagctggaagaacactgctctgcataaggtcacatatttacagaatggcaaagacaggaagtattttcatcataattctgacttccacattccaaaagccacactcaaagatagcggctcctacttctgcagggggcttgttgggagtaaaaatgtgtcttcagagactgtgaacatcaccatcactcaaggtttggcagtgtcaaccatctcatcattctctccacctgggtaccaagtctctttctgcttggtgatggtactcctttttgcagtggacacaggactatatttctctgtgaagacaaacatttgaagctcaacaagagactggaaggaccataaacttaaatggagaaaggaccctcaagacaaatgacccccatcccatgggagtaataagagcagtggcagcag

SEQ ID NO: 36 - protein, 233 aa, Homo sapiens
MWQLLLPTALLLLVSAGMRTEDLPKAVVFLEPQWYSVLEKDSVTLKCQGAYSPEDNSTQWFHNESLISSQASSYFIDAATVNDSGEYRCQTNLSTLSDPVQLEVHIGWLLLQAPRWVFKEEDPIHLRCHSWKNTALHKVTYLQNGKDRKYFHHNSDFHIPKATLKDSGSYFCRGLVGSKNVSSETVNITITQGLAVSTISSFSPPGYQVSFCLVMVLLFAVDTGLYFSVKTNI

SEQ ID NO: 37 - protein, 330 aa, Homo sapiens [sequence omitted]

SEQ ID NO: 38 - protein, 326 aa, Homo sapiens; identical to SEQ ID NO: 24

SEQ ID NO: 39 - protein, 327 aa, Homo sapiens; identical to SEQ ID NO: 26

SEQ ID NO: 40 - protein, 115 aa, Artificial
  An artificially generated sequence
QVQLVQSGAEVKKPGASVKVSCKASGYTFTDYEMHWIRQPPGQGLEWIGAIDPKTGDTAYSQKFKGRVTLTADKSTSTAYMELSSLTSEDTAVYYCTRFYSYTYWGQGTLVTVSS

SEQ ID NO: 41 - protein, 112 aa, Artificial
  An artificially generated sequence
DIVMTQSPLSLPVTPGEPASISCRSSQSLVHSNRNTYLHWYQQKPGQAPRLLIYKVSNRFSGVPDRFSGSGSGTDFTLKISRVEAEDVGVYYCSQNTHVPPTFGQGTKLEIK

SEQ ID NO: 42 - protein, 122 aa, Rattus norvegicus
EVQLVETGGSLVQPGKSLKLTCATSGFTFSNAWMHWVRQSPEKQLEWVAQIKAKSNNYATYYAESVKGRFTISRDDSKSNIYLQMNSLKEEDTAVYYCRYVHYGAYYGVDAWGQGTSVTVSS

SEQ ID NO: 43 - protein, 112 aa, Rattus norvegicus
DVVMTQTPVSMSVSLGGQVSISCRSSQSLVHNNGNTYVSWYIQKPSQSPQLLIYKVSNRFSGISDRFSGSGSGTDFTLKISRVEPDDLGVYYCGQGTQDPYTFGAGTKLELK

SEQ ID NO: 44 - protein, 328 aa, Artificial
  An artificially generated sequence
ASTKGPSVFPLAPSSKSTSGGTAALGCLVKDYFPEPVTVSWNSGALTSGVHTFPAVLQSSGLYSLSSVVTVPSSSLGTQTYICNVNHKPSNTKVDKKVEPKSCDKTHTCPPCPAPELLGGPSVFLFPPKPKDTLMISRTPEVTCVVVDVSHEDPEVKFNWYVDGVEVHNAKTKPREEQYNSTYRVVSVLTVLHQDWLNGKEYKCKVSNKALPAPIEKTISKAKGQPREPQVYTLPPSRCELTKNQVSLSCAVKGFYPSDIAVEWESNGQPENNYKTTPPVLDSDGSFFLVSKLTVDKSRWQQGNVFSCSVMHEALHNHYTQKSLSLSP

SEQ ID NO: 45 - protein, 338 aa, Artificial
  An artificially generated sequence
SSASTKGPSVFPLAPSSKSTSGGTAALGCLVKDYFPEPVTVSWNSGALTSGVHTFPAVLQSSGLYSLSSVVTVPSSSLGTQTYICNVNHKPSNTKVDKKVEPKSCDKTHTCPPCPAPEAAGGPSVFLFPPKPKDTLMISRTPEVTCVVVDVSHEDPEVKFNWYVDGVEVHNAKTKPREEQYASTYRVVSVLTVLHQDWLNGKEYKCKVSNKALPAPIEKTISKAKGQPREPQVCTLPPSRDELTKNQVSLWCLVKGFYPSDIAVEWESNGQPENNYKTTPPVLDSDGSFFLYSKLTVDKSRWQQGNVFSCSVMHEALHNHYTQKSLSLSPHHHHHHHH

SEQ ID NO: 46 - protein, 336 aa, Artificial
  An artificially generated sequence
ASTKGPSVFPLAPSSKSTSGGTAALGCLVKDYFPEPVTVSWNSGALTSGVHTFPAVLQSSGLYSLSSVVTVPSSSLGTQTYICNVNHKPSNTKVDKKVEPKSCDKTHTCPPCPAPEAAGGPSVFLFPPKPKDTLMISRTPEVTCVVVDVSHEDPEVKFNWYVDGVEVHNAKTKPREEQYASTYRVVSVLTVLHQDWLNGKEYKCKVSNKALPAPIEKTISKAKGQPREPQVYTLPPSRCELTKNQVSLSCAVKGFYPSDIAVEWESNGQPENNYKTTPPVLDSDGSFFLVSKLTVDKSRWQQGNVFSCSVMHEALHNHYTQKSLSLSPDYKDDDDK

SEQ ID NO: 47 - protein, 450 aa, Artificial
  An artificially generated sequence
DIVMTQSPLSLPVTPGEPASISCRSSQSLVHSNRNTYLHWYQQKPGQAPRLLIYKVSNRFSGVPDRFSGSGSGTDFTLKISRVEAEDVGVYYCSQNTHVPPTFGQGTKLEIKSSASTKGPSVFPLAPSSKSTSGGTAALGCLVKDYFPEPVTVSWNSGALTSGVHTFPAVLQSSGLYSLSSVVTVPSSSLGTQTYICNVNHKPSNTKVDKKVEPKSCDKTHTCPPCPAPEAAGGPSVFLFPPKPKDTLMISRTPEVTCVVVDVSHEDPEVKFNWYVDGVEVHNAKTKPREEQYASTYRVVSVLTVLHQDWLNGKEYKCKVSNKALPAPIEKTISKAKGQPREPQVCTLPPSRDELTKNQVSLWCLVKGFYPSDIAVEWESNGQPENNYKTTPPVLDSDGSFFLYSKLTVDKSRWQQGNVFSCSVMHEALHNHYTQKSLSLSPHHHHHHHH

SEQ ID NO: 48 - protein, 222 aa, Artificial
  An artificially generated sequence
QVQLVQSGAEVKKPGASVKVSCKASGYTFTDYEMHWIRQPPGQGLEWIGAIDPKTGDTAYSQKFKGRVTLTADKSTSTAYMELSSLTSEDTAVYYCTRFYSYTYWGQGTLVTVSSASVAAPSVFIFPPSDEQLKSGTASVVCLLNNFYPREAKVQWKVDNALQSGNSQESVTEQDSKDSTYSLSSTLTLSKADYEKHKVYACEVTHQGLSSPVTKSFNRGEC

SEQ ID NO: 49 - protein, 458 aa, Artificial
  An artificially generated sequence
EVQLVETGGSLVQPGKSLKLTCATSGFTFSNAWMHWVRQSPEKQLEWVAQIKAKSNNYATYYAESVKGRFTISRDDSKSNIYLQMNSLKEEDTAVYYCRYVHYGAYYGVDAWGQGTSVTVSSASTKGPSVFPLAPSSKSTSGGTAALGCLVKDYFPEPVTVSWNSGALTSGVHTFPAVLQSSGLYSLSSVVTVPSSSLGTQTYICNVNHKPSNTKVDKKVEPKSCDKTHTCPPCPAPEAAGGPSVFLFPPKPKDTLMISRTPEVTCVVVDVSHEDPEVKFNWYVDGVEVHNAKTKPREEQYASTYRVVSVLTVLHQDWLNGKEYKCKVSNKALPAPIEKTISKAKGQPREPQVYTLPPSRCELTKNQVSLSCAVKGFYPSDIAVEWESNGQPENNYKTTPPVLDSDGSFFLVSKLTVDKSRWQQGNVFSCSVMHEALHNHYTQKSLSLSPDYKDDDDK

SEQ ID NO: 50 - protein, 219 aa, Artificial
  An artificially generated sequence
DVVMTQTPVSMSVSLGGQVSISCRSSQSLVHNNGNTYVSWYIQKPSQSPQLLIYKVSNRFSGISDRFSGSGSGTDFTLKISRVEPDDLGVYYCGQGTQDPYTFGAGTKLELKRTVAAPSVFIFPPSDEQLKSGTASVVCLLNNFYPREAKVQWKVDNALQSGNSQESVTEQDSKDSTYSLSSTLTLSKADYEKHKVYACEVTHQGLSSPVTKSFNRGEC

SEQ ID NO: 51 - protein, 122 aa, Artificial
  An artificially generated sequence
QVQLVESGGGVVQPGRSLRLSCAASGFTFSNAWMHWVRQAPGKGLEWVAQIKAKSNNYATYYAESVKGRFTISRDDSKNSLYLQMNSLKTEDTAVYYCARVHYGAYYGVDAWGQGTTVTVSS

SEQ ID NO: 52 - protein, 122 aa, Artificial
  An artificially generated sequence
QVQLVESGGGVVQPGRSLRLSCAASGFTFSNAWMHWVRQAPGKGLEWVAQIKAKSNNYATYYAESVKGRFTISRDDSKNSLYLQMNSLKTEDTAVYYCRYVHYGAYYGVDAWGQGTTVTVSS

SEQ ID NO: 53 - protein, 112 aa, Artificial
  An artificially generated sequence
DIVMTQSPLSLPVTPGEPASISCRSSQSLVHSNRNTYLHWYQQKPGQAPRLLIYKVSNRFSGVPDRFSGSGSGTDFTLKISRVEAEDVGVYYCGQGTQVPYTFGQGTKLEIK

SEQ ID NO: 54 - protein, 448 aa, Artificial
  An artificially generated sequence
QVQLVQSGAEVKKPGASVKVSCKASGYTFTDYEMHWIRQPPGQGLEWIGAIDPKTGDTAYSQKFKGRVTLTADKSTSTAYMELSSLTSEDTAVYYCTRFYSYTYWGQGTLVTVSSASTKGPSVFPLAPCSRSTSESTAALGCLVKDYFPEPVTVSWNSGALTSGVHTFPAVLQSSGLYSLSSVVTVPSSSLGTKTYTCNVDHKPSNTKVDKRVESKYGPPCPPCPAPEFRGGPKVFLFPPKPKDTLMISRTPEVTCVVVDVSQEDPEVQFNWYVDGVEVHNAKTKPREEQFASTYRVVSVLTVLHQDWLNGKEYKCKVSNKGLPSSIEKTISKAKGQPREPQVYTLPPSQKEMTKNQVSLTCLVKGFYPSDIAVEWESNGQPENNYKTTPPVLDSDGSFFLYSRLTVDKSRWQEGNVFSCSVMHEALHNRYTQKSLSLSLHHHHHHHH

SEQ ID NO: 55 - protein, 455 aa, Artificial
  An artificially generated sequence
QVQLVESGGGVVQPGRSLRLSCAASGFTFSNAWMHWVRQAPGKGLEWVAQIKAKSNNYATYYAESVKGRFTISRDDSKNSLYLQMNSLKTEDTAVYYCRYVHYGAYYGVDAWGQGTTVTVSSASTKGPSVFPLAPCSRSTSESTAALGCLVKDYFPEPVTVSWNSGALTSGVHTFPAVLQSSGLYSLSSVVTVPSSSLGTKTYTCNVDHKPSNTKVDKRVESKYGPPCPPCPAPEFRGGPKVFLFPPKPKDTLMISRTPEVTCVVVDVSQEDPEVQFNWYVDGVEVHNAKTKPREEQFASTYRVVSVLTVLHQDWLNGKEYKCKVSNKGLPSSIEKTISKAKGQPREPQVYTLPPSQEEMTKNQVSLTCLVKGFYPSDIAVEWESNGQPENNYKTTPPVLDSDGSFFLYSRLTVDKSRWQEGNVFSCSVMHEALHNHYTQESLSLSLDYKDDDDK

SEQ ID NO: 56 - protein, 219 aa, Artificial
  An artificially generated sequence
DIVMTQSPLSLPVTPGEPASISCRSSQSLVHSNRNTYLHWYQQKPGQAPRLLIYKVSNRFSGVPDRFSGSGSGTDFTLKISRVEAEDVGVYYCGQGTQVPYTFGQGTKLEIKRTVAAPSVFIFPPSDEQLKSGTASVVCLLNNFYPREAKVQWKVDNALQSGNSQESVTEQDSKDSTYSLSSTLTLSKADYEKHKVYACEVTHQGLSSPVTKSFNRGEC

SEQ ID NO: 57 - protein, 336 aa, Artificial; identical to SEQ ID NO: 46
  An artificially generated sequence

SEQ ID NO: 58 - protein, 338 aa, Artificial; identical to SEQ ID NO: 45
  An artificially generated sequence

SEQ ID NO: 59 - protein, 230 aa, Artificial
  An artificially generated sequence
EPKSSDKTHTCPPCPAPELLGGPSVFLFPPKPKDTLMISRTPEVTCVVVDVSHEDPEVKFNWYVDGVEVHNAKTKPREEQYNSTYRVVSVLTVLHQDWLNGKEYKCKVSNKALPAPIEKTISKAKGQPREPQVCTLPPSRDELTKNQVSLWCLVKGFYPSDIAVEWESNGQPENNYKTTPPVLDSDGSFFLYSKLTVDKSRWQQGNVFSCSVMHEALHNRYTQKSLSLSP

SEQ ID NO: 60 - protein, 325 aa, Artificial
  An artificially generated sequence
ASTKGPSVFPLAPCSRSTSESTAALGCLVKDYFPEPVTVSWNSGALTSGVHTFPAVLQSSGLYSLSSVVTVPSSSLGTKTYTCNVDHKPSNTKVDKRVESKYGPPCPPCPAPEFRGGPKVFLFPPKPKDTLMISRTPEVTCVVVDVSQEDPEVQFNWYVDGVEVHNAKTKPREEQFASTYRVVSVLTVLHQDWLNGKEYKCKVSNKGLPSSIEKTISKAKGQPREPQVYTLPPSQKEMTKNQVSLTCLVKGFYPSDIAVEWESNGQPENNYKTTPPVLDSDGSFFLYSKLTVDKSRWQEGNVFSCSVMHEALHNRYTQKSLSLSP

SEQ ID NO: 61 - protein, 325 aa, Artificial
  An artificially generated sequence
ASTKGPSVFPLAPCSRSTSESTAALGCLVKDYFPEPVTVSWNSGALTSGVHTFPAVLQSSGLYSLSSVVTVPSSSLGTQTYTCNVDHKPSNTKVDKRVESKYGPPCPPCPAPEFRGGPKVFLFPPKPKDTLMISRTPEVTCVVVDVSQEDPEVQFNWYVDGVEVHNAKTKPREEQFASTYRVVSVLTVLHQDWLNGKEYKCKVSNKGLPSSIEKTISKAKGQPREPQVYTLPPSQEEMTKNQVSLTCLVKGFYPSDIAVEWESNGQPENNYKTTPPVLDSDGSFFLYSKLTVDKSRWQEGNVFSCSVMHEALHNHYTQESLSLSP

SEQ ID NO: 62 - protein, 325 aa, Artificial
  An artificially generated sequence
ASTKGPSVFPLAPCSRSTSESTAALGCLVKDYFPEPVTVSWNSGALTSGVHTFPAVLQSSGLYSLSSVVTVPSSSLGTKTYTCNVDHKPSNTKVDKRVESKYGPPCPPCPAPEFRGGPKVFLFPPKPKDTLMISRTPEVTCVVVDVSQEDPEVQFNWYVDGVEVHNAKTKPREEQFASTYRVVSVLTVLHQDWLNGKEYKCKVSNKGLPSSIEKTISKAKGQPREPQVYTLPPSQKEMTKNQVSLTCLVKGFYPSDIAVEWESNGQPENNYKTTPPVLDSDGSFFLYSKLTVDKSRWQEGNVFSCSVMHEALHNHYTQKSLSLSP

SEQ ID NO: 63 - protein, 107 aa, Artificial [sequence omitted]

SEQ ID NO: 64 - protein, 122 aa, Artificial
  An artificially generated sequence
QVQLVESGGGLVQPGRSLRLSCAASGFTFSNAWMHWVRQAPGKGLEWVAQIKAKSNNYATYYAESVKGRFTISRADSKNSIYLQMNSLKTEDTAVYYCRYVHYGAYYGVDAWGQGTTVTVSS

SEQ ID NO: 65 - protein, 122 aa, Artificial
  An artificially generated sequence
QVQLVESGGGLVQPGRSLRLSCAASGFTFSNAWMHWVRQAPGKGLEWVAQIKAKSNNYATYYAESVKGRFTISRDDSKNSIYLQMNSLKTEDTAVYYCRYVHYGAYYGVQAWGQGTTVTVSS

SEQ ID NO: 66 - protein, 122 aa, Artificial
  An artificially generated sequence
QVQLVESGGGLVQPGRSLRLSCAASGFTFSNAWMHWVRQAPGKGLEWVAQIKAKSNNYATYYAESVKGRFTISRADSKNSIYLQMNSLKTEDTAVYYCRYVHYGAYYGVQAWGQGTTVTVSS

SEQ ID NO: 67 - protein, 122 aa, Artificial
  An artificially generated sequence
QVQLVESGGGVVQPGRSLRLSCAASGFTFSNAWMHWVRQAPGKGLEWVAQIKAKSNNYATYYAESVKGRFTISRADSKNSLYLQMNSLKTEDTAVYYCRYVHYGAYYGVQAWGQGTTVTVSS

SEQ ID NO: 68 - protein, 122 aa, Artificial
  An artificially generated sequence
QVQLVESGGGVVQPGGSLRLSCAASGFTFSNAWMHWVRQAPGKGLEWVAQIKAKSNNYATYYAESVKGRFTISRDDSKNSLYLQMNSLKTEDTAVYYCRYVHYGAYYGVDAWGQGTTVTVSS

SEQ ID NO: 69 - protein, 122 aa, Artificial
  An artificially generated sequence
QVQLVESGGGLVQPGRSLRLSCAASGFTFSNAWMHWVRQAPGKGLEWVAQIKAKSQNYATYYAESVKGRFTISRADSKNSIYLQMNSLKTEDTAVYYCRYVHYGAYYGVDIWGQGTTVTVSS

SEQ ID NO: 70 - protein, 122 aa, Artificial
  An artificially generated sequence
QVQLVESGGGLVQPGRSLRLSCAASGFTFSNAWMHWVRQAPGKGLEWVAQIKSKSNNYATYYAESVKGRFTISRADSKNSIYLQMNSLKTEDTAVYYCRYVHYGAYYGVDIWGQGTTVTVSS

SEQ ID NO: 71 - protein, 122 aa, Artificial
  An artificially generated sequence
QVQLVESGGGLVQPGRSLRLSCAASGFTFSNAWMHWVRQAPGKGLEWVAQIKGKSNNYATYYAESVKGRFTISRADSKNSIYLQMNSLKTEDTAVYYCRYVHYGAYYGVDIWGQGTTVTVSS

SEQ ID NO: 72 - protein, 122 aa, Artificial
  An artificially generated sequence
QVQLVESGGGLVQPGRSLRLSCAASGFTFSNAWMHWVRQAPGKGLEWVAQIKAKSNNYATYYAPSVKGRFTISRADSKNSIYLQMNSLKTEDTAVYYCRYVHYGAYYGVDIWGQGTTVTVSS

SEQ ID NO: 73 - protein, 122 aa, Artificial
  An artificially generated sequence
QVQLVESGGGLVQPGRSLRLSCAASGFTFSNAWMHWVRQAPGKGLEWVAQIKAKSNNYATYYAESVKGRFTISRADSKNSIYLQMNSLKTEDTAVYYCRYVHYSAYYGVDIWGQGTTVTVSS

SEQ ID NO: 74 - protein, 122 aa, Artificial
  An artificially generated sequence
QVQLVESGGGLVQPGRSLRLSCAASGFTFSNAWMHWVRQAPGKGLEWVAQIKAKSNNYATYYAESVKGRFTISRADSKNSIYLQMNSLKTEDTAVYYCRYVHYGASYGVDIWGQGTTVTVSS

SEQ ID NO: 75 - protein, 122 aa, Artificial
  An artificially generated sequence
QVQLVESGGGLVQPGRSLRLSCAASGFTFSNAWMHWVRQAPGKGLEWVAQIKAKSNNYATYYAESVKGRFTISRADSKNSIYLQMNSLKTEDTAVYYCRYVHYYYSYGVDIWGQGTTVTVSS

SEQ ID NO: 76 - protein, 122 aa, Artificial
  An artificially generated sequence
QVQLVESGGGLVQPGRSLRLSCAASGFTFSNAWMHWVRQAPGKGLEWVAQIKGKSQNYATYYAESVKGRFTISRADSKNSIYLQMNSLKTEDTAVYYCRYVHYGAYYGVDIWGQGTTVTVSS

SEQ ID NO: 77 - protein, 122 aa, Artificial
  An artificially generated sequence
QVQLVESGGGLVQPGRSLRLSCAASGFTFSNAWMHWVRQAPGKGLEWVAQIKGKSNNYATYYAPSVKGRFTISRADSKNSIYLQMNSLKTEDTAVYYCRYVHYGAYYGVDIWGQGTTVTVSS

SEQ ID NO: 78 - protein, 122 aa, Artificial
  An artificially generated sequence
QVQLVESGGGLVQPGRSLRLSCAASGFTFSNAWMHWVRQAPGKGLEWVAQIKGKSNNYATYYAESVKGRFTISRADSKNSIYLQMNSLKTEDTAVYYCRYVHYSASYGVDIWGQGTTVTVSS

SEQ ID NO: 79 - protein, 122 aa, Artificial
  An artificially generated sequence
QVQLVESGGGLVQPGRSLRLSCAASGFTFSNAWMHWVRQAPGKGLEWVAQIKGKSNNYATYYAESVKGRFTISRADSKNSIYLQMNSLKTEDTAVYYCRYVHYSYSYGVDIWGQGTTVTVSS

SEQ ID NO: 80 - protein, 122 aa, Artificial
  An artificially generated sequence
QVQLVESGGGLVQPGGSLRLSCAASGFTFSNAWMHWVRQAPGKGLEWVAQIKAKSNNYATYYAESVKGRFTISRADSKNSIYLQMNSLKTEDTAVYYCRYVHYGAYYGVDIWGQGTTVTVSS

SEQ ID NO: 81 - protein, 122 aa, Artificial
  An artificially generated sequence
QVQLVESGGGLVQPGGSLRLSCAASGFTFSNAWMHWVRQAPGKGLEWVAQIKGKSNNYATYYAESVKGRFTISRADSKNSIYLQMNSLKTEDTAVYYCRYVHYSASYGVDIWGQGTTVTVSS

SEQ ID NO: 82 - protein, 122 aa, Artificial
  An artificially generated sequence
QVQLVESGGGLVQPGRSLRLSCAASGFTFSNAWMHWVRQAPGKGLEWVAQIKGKSQNYATYYAESVKGRFTISRADSKNSIYLQMNSLKTEDTAVYYCRYVHYSASYGVDIWGQGTTVTVSS

SEQ ID NO: 83 - protein, 122 aa, Artificial
  An artificially generated sequence
QVQLVESGGGLVQPGRSLRLSCAASGFTFSNAWMHWVRQAPGKGLEWVAQIKGKSNNYATYYAPSVKGRFTISRADSKNSIYLQMNSLKTEDTAVYYCRYVHYSASYGVDIWGQGTTVTVSS

SEQ ID NO: 84 - protein, 122 aa, Artificial
  An artificially generated sequence
QVQLVESGGGLVQPGRSLRLSCAASGFTFSNAWMHWVRQAPGKGLEWVAQIKGKSNNYATYYAESVKGRFTISRADSKNSIYLQMNSLKTEDTAVYYCRYVHYSASYGVDAWGQGTTVTVSS

SEQ ID NO: 85 - protein, 122 aa, Artificial
  An artificially generated sequence
QVQLVESGGGLVQPGGSLRLSCAASGFTFSNAWMHWVRQAPGKGLEWVAQIKGKSQNYATYYAPSVKGRFTISRADSKNSIYLQMNSLKTEDTAVYYCRYVHYSASYGVDIWGQGTTVTVSS

SEQ ID NO: 86 - protein, 122 aa, Artificial
  An artificially generated sequence
QVQLVESGGGLVQPGGSLRLSCAASGFTFSNAWMHWVRQAPGKGLEWVAQIKGKSQNYATYYAESVKGRFTISRADSKNSIYLQMNSLKTEDTAVYYCRYVHYSASYGVDIWGQGTTVTVSS

SEQ ID NO: 87 - protein, 122 aa, Artificial
  An artificially generated sequence
QVQLVESGGGLVQPGGSLRLSCAASGFTFSNAWMHWVRQAPGKGLEWVAQIKGKSQNYATYYAESVKGRFTISRADSKNSIYLQMNSLKTEDTAVYYCRYVHYSASYGVDAWGQGTTVTVSS

SEQ ID NO: 88 - protein, 122 aa, Artificial
  An artificially generated sequence
QVQLVESGGGLVQPGRSLRLSCAASGFTFSNAWMHWVRQAPGKGLEWVAQIKSKSQNYATYYAESVKGRFTISRADSKNSIYLQMNSLKTEDTAVYYCRYVHYSASYGVDIWGQGTTVTVSS

SEQ ID NO: 89 - protein, 122 aa, Artificial
  An artificially generated sequence
QVQLVESGGGLVQPGGSLRLSCAASGFTFSNAWMHWVRQAPGKGLEWVAQIKSKSQNYATYYAESVKGRFTISRADSKNSIYLQMNSLKTEDTAVYYCRYVHYSASYGVDIWGQGTTVTVSS

SEQ ID NO: 90 - protein, 122 aa, Artificial
  An artificially generated sequence
QVQLVESGGGLVQPGGSLRLSCAASGFTFSNAWMHWVRQAPGKGLEWVAQIKSKSQNYATYYAESVKGRFTISRADSKNSIYLQMNSLKTEDTAVYYCRYVHYSASYGVDAWGQGTTVTVSS

SEQ ID NO: 91 - protein, 122 aa, Artificial
  An artificially generated sequence
QVQLVESGGGVVQPGGSLRLSCAASGFTFSNAWMHWVRQAPGKGLEWVAQIKSKSQNYATYYAESVKGRFTISRADSKNSIYLQMNSLKTEDTAVYYCRYVHYSASYGVDIWGQGTTVTVSS

SEQ ID NO: 92 - protein, 122 aa, Artificial
  An artificially generated sequence
QVQLVESGGGLVQPGRSLRLSCSASGFTFSNAWMHWVRQAPGKGLEWVAQIKGKSNNYATYYAESVKGRFTISRADSKNSIYLQMNSLKTEDTAVYYCRYVHYSASYGVDIWGQGTTVTVSS

SEQ ID NO: 93 - protein, 122 aa, Artificial
  An artificially generated sequence
QVQLVESGGGVVQPGRSLRLSCAASGFTFSNAWMHWVRQAPGKGLEWVAQIKGKSNNYATYYAESVKGRFTISRADSKNSIYLQMNSLKTEDTAVYYCRYVHYSASYGVDIWGQGTTVTVSS

SEQ ID NO: 94 - protein, 122 aa, Artificial
  An artificially generated sequence
QVQLVESGGGVVQPGGSLRLSCAASGFTFSNAWMHWVRQAPGKGLEWVAQIKGKSNNYATYYAESVKGRFTISRADSKNSIYLQMNSLKTEDTAVYYCRYVHYSASYGVDIWGQGTTVTVSS

SEQ ID NO: 95 - protein, 122 aa, Artificial
  An artificially generated sequence
QVQLVESGGGLVQPGRSLRLSCAASGFTFSNAWMHWVRQAPGKGLEWVAQIKSKSQNYATYYAESVKGRFTISRADSKNSIYLQMNSLKTEDTAVYYCRYVHYSASYGVDAWGQGTTVTVSS

SEQ ID NO: 96 - protein, 122 aa, Artificial
  An artificially generated sequence
QVQLVESGGGLVQPGRSLRLSCAASGFTFSNAWMHWVRQAPGKGLEWVAQIKSKSQNYATYYAESVKGRFTISRADSKNSIYLQMNSLKTEDTAVYYCRYVHYSASYGVDYWGQGTTVTVSS

SEQ ID NO: 97 - protein, 122 aa, Artificial
  An artificially generated sequence
QVQLVESGGGLVQPGRSLRLSCAASGFTFSNAWMHWVRQAPGKGLEWVAQIKGKSQNYATYYAESVKGRFTISRADSKNSIYLQMNSLKTEDTAVYYCRYVHYSASYGVDAWGQGTTVTVSS

SEQ ID NO: 98 - protein, 122 aa, Artificial
  An artificially generated sequence
QVQLVESGGGLVQPGRSLRLSCAASGFTFSNAWMHWVRQAPGKGLEWVAQIKGKSQNYATYYAESVKGRFTISRADSKNSIYLQMNSLKTEDTAVYYCRYVHYSASYGVDYWGQGTTVTVSS

SEQ ID NO: 99 - protein, 122 aa, Artificial
  An artificially generated sequence
QVQLVESGGGLVQPGRSLRLSCAASGFTFSNAWMHWVRQAPGKGLEWVAQIKGKSNNYATYYAESVKGRFTISRADSKNSIYLQMNSLKTEDTAVYYCRYVHYSASYGVDYWGQGTTVTVSS

SEQ ID NO: 100 - protein, 122 aa, Artificial
  An artificially generated sequence
QVQLVESGGGLVQPGRSLRLSCAASGFTFSNAWMPWVRQAPGKGLEWVAQIKGKSNNYATYYAESVKGRFTISRADSKNSIYLQMNSLKTEDTAVYYCRYVHYSASYGVDIWGQGTTVTVSS

SEQ ID NO: 101 - protein, 122 aa, Artificial
  An artificially generated sequence
QVQLVESGGGLVQPGRSLRLSCAASGFTFSNAWMHWVRQAPGKGLEWVAQIKDKSNNYATYYAESVKGRFTISRADSKNSIYLQMNSLKTEDTAVYYCRYVHYSASYGVDIWGQGTTVTVSS

SEQ ID NO: 102 - protein, 122 aa, Artificial
  An artificially generated sequence
QVQLVESGGGLVQPGRSLRLSCAASGFTFSNAWMHWVRQAPGKGLEWVAQIKDKSQNYATYYAESVKGRFTISRADSKNSIYLQMNSLKTEDTAVYYCRYVHYSASYGVDIWGQGTTVTVSS

SEQ ID NO: 103 - protein, 122 aa, Artificial
  An artificially generated sequence
QVQLVESGGGLVQPGRSLRLSCAASGFTFSNAWMHWVRQAPGKGLEWVAQIKDKSQNYATYYAESVKGRFTISRADSKNSIYLQMNSLKTEDTAVYYCRYVHYSASYGVDAWGQGTTVTVSS

SEQ ID NO: 104 - protein, 122 aa, Artificial
  An artificially generated sequence
QVQLVESGGGLVQPGRSLRLSCAASGFTFSNAWMHWVRQAPGKGLEWVAQIKDKSQNYATYYAESVKGRFTISRADSKNSIYLQMNSLKTEDTAVYYCRYVHYSASYGVDYWGQGTTVTVSS

SEQ ID NO: 105 - protein, 122 aa, Artificial
  An artificially generated sequence
QVQLVESGGGVVQPGGSLRLSCAASGFTFSNAWMHWVRQAPGKGLEWVAQIKDKSQNYATYYAESVKGRFTISRADSKNSIYLQMNSLKTEDTAVYYCRYVHYSASYGVDAWGQGTTVTVSS

SEQ ID NO: 106 - protein, 122 aa, Artificial
  An artificially generated sequence
QVQLVESGGGLVQPGRSLRLSCSASGFTFSNAWMHWVRQAPGKGLEWVAQIKDKSNNYATYYAESVKGRFTISRADSKNSIYLQMNSLKTEDTAVYYCRYVHYSASYGVDIWGQGTTVTVSS

SEQ ID NO: 107 - protein, 122 aa, Artificial
  An artificially generated sequence
QVQLVESGGGLVQPGRSLRLSCSASGFTFSNAWMHWVRQAPGKGLEWVAQIKDKSQNYATYYAESVKGRFTISRADSKNSIYLQMNSLKTEDTAVYYCRYVHYSASYGVDIWGQGTTVTVSS

SEQ ID NO: 108 - protein, 122 aa, Artificial
  An artificially generated sequence
QVQLVESGGGLVQPGRSLRLSCSASGFTFSNAWMHWVRQAPGKGLEWVAQIKDKSQNYATYYAESVKGRFTISRADSKNSIYLQMNSLKTEDTAVYYCRYVHYSASYGVDAWGQGTTVTVSS

SEQ ID NO: 109 - protein, 122 aa, Artificial
  An artificially generated sequence
QVQLVESGGGLVQPGRSLRLSCSASGFTFSNAWMHWVRQAPGKGLEWVAQIKDKSQNYATYYAESVKGRFTISRADSKNSIYLQMNSLKTEDTAVYYCRYVHYSASYGVDYWGQGTTVTVSS

SEQ ID NO: 110 - protein, 122 aa, Artificial
  An artificially generated sequence
QVQLVESGGGLVQPGRSLRLSCAASGFTFSNAWMHWVRQAPGKGLEWVAQIKDKSNNYATYYAESVKGRFTISRDDSKNSIYLQMNSLKTEDTAVYYCRYVHYSASYGVDIWGQGTTVTVSS

SEQ ID NO: 111 - protein, 122 aa, Artificial
  An artificially generated sequence
QVQLVESGGGLVQPGRSLRLSCAASGFTFSNAWMHWVRQAPGKGLEWVAQIKDKSQNYATYYAESVKGRFTISRDDSKNSIYLQMNSLKTEDTAVYYCRYVHYSASYGVDIWGQGTTVTVSS

SEQ ID NO: 112 - protein, 122 aa, Artificial
  An artificially generated sequence
QVQLVESGGGLVQPGRSLRLSCAASGFTFSNAWMHWVRQAPGKGLEWVAQIKDKSQNYATYYAESVKGRFTISRDDSKNSIYLQMNSLKTEDTAVYYCRYVHYSASYGVDAWGQGTTVTVSS

SEQ ID NO: 113 - protein, 122 aa, Artificial
  An artificially generated sequence
QVQLVESGGGLVQPGRSLRLSCAASGFTFSNAWMHWVRQAPGKGLEWVAQIKDKSQNYATYYAESVKGRFTISRDDSKNSIYLQMNSLKTEDTAVYYCRYVHYSASYGVDYWGQGTTVTVSS

SEQ ID NO: 114 - protein, 122 aa, Artificial
  An artificially generated sequence
QVQLVESGGGLVQPGRSLRLSCAASGFTFSNAWMHWVRQAPGKGLEWVAQIKDKSNNYATYYAESVKGRFTISRADSKNSLYLQMNSLKTEDTAVYYCRYVHYSASYGVDIWGQGTTVTVSS

SEQ ID NO: 115 - protein, 122 aa, Artificial
  An artificially generated sequence
QVQLVESGGGLVQPGRSLRLSCAASGFTFSNAWMHWVRQAPGKGLEWVAQIKDKSQNYATYYAESVKGRFTISRADSKNSLYLQMNSLKTEDTAVYYCRYVHYSASYGVDIWGQGTTVTVSS

SEQ ID NO: 116 - protein, 122 aa, Artificial
  An artificially generated sequence
QVQLVESGGGLVQPGRSLRLSCAASGFTFSNAWMHWVRQAPGKGLEWVAQIKDKSQNYATYYAESVKGRFTISRADSKNSLYLQMNSLKTEDTAVYYCRYVHYSASYGVDAWGQGTTVTVSS

SEQ ID NO: 117 - protein, 122 aa, Artificial
  An artificially generated sequence
QVQLVESGGGLVQPGRSLRLSCAASGFTFSNAWMHWVRQAPGKGLEWVAQIKDKSQNYATYYAESVKGRFTISRADSKNSLYLQMNSLKTEDTAVYYCRYVHYSASYGVDYWGQGTTVTVSS

SEQ ID NO: 118 - protein, 122 aa, Artificial
  An artificially generated sequence
QVQLVESGGGLVQPGRSLRLSCAASGFTFSNAWMHWVRQAPGKGLEWVAQIKDKSNNYATYYAESVKGRFTISRDDSKNSLYLQMNSLKTEDTAVYYCRYVHYSASYGVDIWGQGTTVTVSS

SEQ ID NO: 119 - protein, 122 aa, Artificial
  An artificially generated sequence
QVQLVESGGGLVQPGRSLRLSCAASGFTFSNAWMHWVRQAPGKGLEWVAQIKDKSQNYATYYAESVKGRFTISRDDSKNSLYLQMNSLKTEDTAVYYCRYVHYSASYGVDIWGQGTTVTVSS

SEQ ID NO: 120 - protein, 122 aa, Artificial
  An artificially generated sequence
QVQLVESGGGLVQPGRSLRLSCAASGFTFSNAWMHWVRQAPGKGLEWVAQIKDKSQNYATYYAESVKGRFTISRDDSKNSLYLQMNSLKTEDTAVYYCRYVHYSASYGVDAWGQGTTVTVSS

SEQ ID NO: 121 - protein, 122 aa, Artificial
  An artificially generated sequence
QVQLVESGGGLVQPGRSLRLSCAASGFTFSNAWMHWVRQAPGKGLEWVAQIKDKSQNYATYYAESVKGRFTISRDDSKNSLYLQMNSLKTEDTAVYYCRYVHYSASYGVDYWGQGTTVTVSS

SEQ ID NO: 122 - protein, 122 aa, Artificial
  An artificially generated sequence
QVQLVESGGGLVQPGRSLRLSCAASGFTFSNAWMHWVRQAPGKGLEWVAQIKDKSQNYATYYAESVKGRFTISRADSKNSIYLQMNSLKTEDTAVYYCRYVHYAASYGVDIWGQGTTVTVSS

SEQ ID NO: 123 - protein, 122 aa, Artificial
  An artificially generated sequence
QVQLVESGGGLVQPGRSLRLSCAASGFTFSNAWMHWVRQAPGKGLEWVAQIKDKSQNYATYYAESVKGRFTISRADSKNSIYLQMNSLKTEDTAVYYCRYVHYAASYGVDAWGQGTTVTVSS

SEQ ID NO: 124 - protein, 122 aa, Artificial
  An artificially generated sequence
QVQLVESGGGVVQPGGSLRLSCAASGFTFSNAWMHWVRQAPGKGLEWVAQIKDKSQNYATYYAESVKGRFTISRADSKNSIYLQMNSLKTEDTAVYYCRYVHYAASYGVDAWGQGTTVTVSS

SEQ ID NO: 125 - protein, 122 aa, Artificial
  An artificially generated sequence
QVQLVESGGGLVQPGRSLRLSCSASGFTFSNAWMHWVRQAPGKGLEWVAQIKDKSQNYATYYAESVKGRFTISRADSKNSIYLQMNSLKTEDTAVYYCRYVHYAASYGVDAWGQGTTVTVSS

SEQ ID NO: 126 - protein, 122 aa, Artificial
  An artificially generated sequence
QVQLVESGGGLVQPGRSLRLSCAASGFTFSNAWMHWVRQAPGKGLEWVAQIKDKSQNYATYYAESVKGRFTISRDDSKNSIYLQMNSLKTEDTAVYYCRYVHYAASYGVDAWGQGTTVTVSS

SEQ ID NO: 127 - protein, 122 aa, Artificial
  An artificially generated sequence
QVQLVESGGGLVQPGRSLRLSCAASGFTFSNAWMHWVRQAPGKGLEWVAQIKDKSQNYATYYAESVKGRFTISRADSKNSLYLQMNSLKTEDTAVYYCRYVHYAASYGVDAWGQGTTVTVSS

SEQ ID NO: 128 - protein, 122 aa, Artificial
  An artificially generated sequence
QVQLVESGGGLVQPGRSLRLSCAASGFTFSNAWMHWVRQAPGKGLEWVAQIKDKSQNYATYYAESVKGRFTISRDDSKNSLYLQMNSLKTEDTAVYYCRYVHYAASYGVDAWGQGTTVTVSS

SEQ ID NO: 129 - protein, 122 aa, Artificial
  An artificially generated sequence
QVQLVESGGGVVQPGGSLRLSCAASGFTFSNAWMHWVRQAPGKGLEWVAQIKDKSQNYATYYAESVKGRFTISRDDSKNSLYLQMNSLKTEDTAVYYCRYVHYAASYGVDAWGQGTTVTVSS

SEQ ID NO: 130 - protein, 122 aa, Artificial
  An artificially generated sequence
QVQLVESGGGVVQPGGSLRLSCAASGFTFSNAWMHWVRQAPGKGLEWVAQIKDKSQNYATYYAESVKGRFTISRDDSKNSLYLQMNSLKTEDTAVYYCRYVHYAASYGVDIWGQGTTVTVSS

SEQ ID NO: 131 - protein, 122 aa, Artificial
  An artificially generated sequence
QVQLVESGGGVVQPGGSLRLSCAASGFTFSNAWMHWVRQAPGKGLEWVAQIKDKSQNYATYYAESVKGRFTISRDDSKNSLYLQMNSLKTEDTAVYYCRYVHYAASYGVDYWGQGTTVTVSS

SEQ ID NO: 132 - protein, 122 aa, Artificial
  An artificially generated sequence
QVQLVESGGGLVQPGRSLRLSCAASGFTFSNAWMHWVRQAPGKGLEWVAQIKDKSNNYATYYAESVKGRFTISRADSKNSIYLQMNSLKTEDTAVYYCRYVHYAASYGVDIWGQGTTVTVSS

SEQ ID NO: 133 - protein, 122 aa, Artificial; identical to SEQ ID NO: 122
  An artificially generated sequence

SEQ ID NO: 134 - protein, 122 aa, Artificial
  An artificially generated sequence
QVQLVESGGGLVQPGRSLRLSCAASGFTFSNAWMHWVRQAPGKGLEWVAQIKDKSQNYATYYAESVKGRFTISRDDSKNSLYLQMNSLKTEDTAVYYCRYVHYAASYGVDIWGQGTTVTVSS

SEQ ID NO: 135 - protein, 122 aa, Artificial
  An artificially generated sequence
QVQLVESGGGVVQPGGSLRLSCAASGFTFSNAWMHWVRQAPGKGLEWVAQIKDKSQNYATYYAESVKGRFTISRADSKNSIYLQMNSLKTEDTAVYYCRYVHYAASYGVDIWGQGTTVTVSS

SEQ ID NO: 136 - protein, 122 aa, Artificial
  An artificially generated sequence
QVQLVESGGGLVQPGRSLRLSCAASGFTFSNAWMHWVRQAPGKGLEWVAQIKDKSQNYATYYAESVKGRFTISRDDSKNSLYLQMNSLKTEDTAVYYCRYVHYAASYGVDYWGQGTTVTVSS

SEQ ID NO: 137 - protein, 122 aa, Artificial
  An artificially generated sequence
QVQLVESGGGVVQPGGSLRLSCAASGFTFSNAWMHWVRQAPGKGLEWVAQIKDKSQNYATYYAESVKGRFTISRADSKNSIYLQMNSLKTEDTAVYYCRYVHYAASYGVDYWGQGTTVTVSS

SEQ ID NO: 138 - protein, 124 aa, Artificial
  An artificially generated sequence
QVQLVESGGGLVQPGRSLRLSCAASGFTFSNAWMHWVRQAPGKGLEWVAQIKDKSNNYATYYAESVKGRFTISRADSKNSIYLQMNSLKTEDTAVYYCRYVHYAAAEMVRDDIWGQGTTVTVSS

SEQ ID NO: 139 - protein, 128 aa, Artificial
  An artificially generated sequence
QVQLVESGGGLVQPGRSLRLSCAASGFTFSNAWMHWVRQAPGKGLEWVAQIKDKSNNYATYYAESVKGRFTISRADSKNSIYLQMNSLKTEDTAVYYCRYVHYAAAEMVRDSYGVDIWGQGTTVTVSS

SEQ ID NO: 140 - protein, 128 aa, Artificial
  An artificially generated sequence
QVQLVESGGGLVQPGRSLRLSCAASGFTFSNAWMHWVRQAPGKGLEWVAQIKDKSNNYATYYAESVKGRFTISRADSKNSIYLQMNSLKTEDTAVYYCRYVHYAAVRRRLSSYGVDIWGQGTTVTVSS

SEQ ID NO: 141 - protein, 122 aa, Artificial
  An artificially generated sequence
QVQLVESGGGLVQPGRSLRLSCAASGFTFSNAWMHWVRQAPGKGLEWVAQIKDKSQNYATYYAESVKGRFTISRADSKNSIYLQMNSLKTEDTAVYYCRYVHYAAGYGVDIWGQGTTVTVSS

SEQ ID NO: 142 - protein, 122 aa, Artificial
  An artificially generated sequence
QVQLVESGGGLVQPGRSLRLSCAASGFTFSNAWMHWVRQAPGKGLEWVAQIKDKSQNYATYYAESVKGRFTISRDDSKNSLYLQMNSLKTEDTAVYYCRYVHYAAGYGVDAWGQGTTVTVSS

SEQ ID NO: 143 - protein, 122 aa, Artificial
  An artificially generated sequence
QVQLVESGGGLVQPGRSLRLSCAASGFTFSNAWMHWVRQAPGKGLEWVAQIKDKSNNYATYYAESVKGRFTISRADSKNSIYLQMNSLKTEDTAVYYCRYVHYAAGYGVDIWGQGTTVTVSS

SEQ ID NO: 144 - protein, 122 aa, Artificial
  An artificially generated sequence
QVQLVESGGGVVQPGGSLRLSCAASGFTFSNAWMHWVRQAPGKGLEWVAQIKDKSQNYATYYAESVKGRFTISRADSKNSIYLQMNSLKTEDTAVYYCRYVHYAAGYGVDIWGQGTTVTVSS

SEQ ID NO: 145 - protein, 122 aa, Artificial
  An artificially generated sequence
QVQLVESGGGLVQPGGSLRLSCAASGFTFSNAWMHWVRQAPGKGLEWVAQIKDKSQNYATYYAESVKGRFTISRDDSKNSLYLQMNSLKTEDTAVYYCRYVHYAAGYGVDAWGQGTTVTVSS

SEQ ID NO: 146 - protein, 122 aa, Artificial
  An artificially generated sequence
QVQLVESGGGLVQPGRSLKLSCAASGFTFSNAWMHWVRQAPGKGLEWVAQIKDKSQNYATYYAESVKGRFTISRDDSKNSLYLQMNSLKTEDTAVYYCRYVHYAAGYGVDAWGQGTTVTVSS

SEQ ID NO: 147 - protein, 122 aa, Artificial
  An artificially generated sequence
QVQLVESGGGLVQPGRSLRLSCAASGFTFSNAWMHWVRQAPGKGLEWVAQIKDKSQNYATYYAESVAGRFTISRDDSKNSLYLQMNSLKTEDTAVYYCRYVHYAAGYGVDAWGQGTTVTVSS

SEQ ID NO: 148 - protein, 122 aa, Artificial
  An artificially generated sequence
QVQLVESGGGLVQPGRSLRLSCAASGFTFSNAWMHWVRQAPGKGLEWVAQIKDKSQNYATYYAESVQGRFTISRDDSKNSLYLQMNSLKTEDTAVYYCRYVHYAAGYGVDAWGQGTTVTVSS

SEQ ID NO: 149 - protein, 122 aa, Artificial
  An artificially generated sequence
QVQLVESGGGLVQPGRSLRLSCAASGFTFSNAWMHWVRQAPGKGLEWVAQIKDKSQNYATYYAESVSGRFTISRDDSKNSLYLQMNSLKTEDTAVYYCRYVHYAAGYGVDAWGQGTTVTVSS

SEQ ID NO: 150 - protein, 122 aa, Artificial
  An artificially generated sequence
QVQLVESGGGLVQPGRSLRLSCAASGFTFSNAWMHWVRQAPGKGLEWVAQIKDKSQNYAFYYAESVKGRFTISRDDSKNSLYLQMNSLKTEDTAVYYCRYVHYAAGYGVDAWGQGTTVTVSS

SEQ ID NO: 151 - protein, 122 aa, Artificial
  An artificially generated sequence
QVQLVESGGGLVQPGRSLRLSCAASGFTFSNAWMHWVRQAPGKGLEWVAQIKDKSQNYAGYYAESVKGRFTISRDDSKNSLYLQMNSLKTEDTAVYYCRYVHYAAGYGVDAWGQGTTVTVSS

SEQ ID NO: 152 - protein, 122 aa, Artificial
  An artificially generated sequence
QVQLVESGGGLVQPGRSLRLSCAASGFTFSNAWMHWVRQAPGKGLEWVAQIKDKSQNYALYYAESVKGRFTISRDDSKNSLYLQMNSLKTEDTAVYYCRYVHYAAGYGVDAWGQGTTVTVSS

SEQ ID NO: 153 - protein, 122 aa, Artificial
  An artificially generated sequence
QVQLVESGGGLVQPGRSLRLSCAASGFTFSNAWMHWVRQAPGKGLEWVAQIKDKSQNYAPYYAESVKGRFTISRDDSKNSLYLQMNSLKTEDTAVYYCRYVHYAAGYGVDAWGQGTTVTVSS

SEQ ID NO: 154 - protein, 122 aa, Artificial
  An artificially generated sequence
QVQLVESGGGLVQPGRSLRLSCAASGFTFSNAWMHWVRQAPGKGLEWVAQIKDKSQNYAQYYAESVKGRFTISRDDSKNSLYLQMNSLKTEDTAVYYCRYVHYAAGYGVDAWGQGTTVTVSS

SEQ ID NO: 155 - protein, 122 aa, Artificial
  An artificially generated sequence
QVQLVESGGGLVQPGRSLRLSCAASGFTFSNAWMHWVRQAPGKGLEWVAQIKDKSQNYASYYAESVKGRFTISRDDSKNSLYLQMNSLKTEDTAVYYCRYVHYAAGYGVDAWGQGTTVTVSS

SEQ ID NO: 156 - protein, 122 aa, Artificial
  An artificially generated sequence
QVQLVESGGGLVQPGRSLRLSCAASGFTFSNAWMHWVRQAPGKGLEWVAQIKDKSQNYAVYYAESVKGRFTISRDDSKNSLYLQMNSLKTEDTAVYYCRYVHYAAGYGVDAWGQGTTVTVSS

SEQ ID NO: 157 - protein, 122 aa, Artificial
  An artificially generated sequence
QVQLVESGGGLVQPGRSLRLSCAASGFTFSNAWMHWVRQAPGKGLEWVAQIKDKSQNYATYFAESVKGRFTISRDDSKNSLYLQMNSLKTEDTAVYYCRYVHYAAGYGVDAWGQGTTVTVSS

SEQ ID NO: 158 - protein, 122 aa, Artificial
  An artificially generated sequence
QVQLVESGGGLVQPGRSLRLSCAASGFTFSNAWMHWVRQAPGKGLEWVAQIKDKSQNYATYGAESVKGRFTISRDDSKNSLYLQMNSLKTEDTAVYYCRYVHYAAGYGVDAWGQGTTVTVSS

SEQ ID NO: 159 - protein, 122 aa, Artificial
  An artificially generated sequence
QVQLVESGGGLVQPGRSLRLSCAASGFTFSNAWMHWVRQAPGKGLEWVAQIKDKSQNYATYIAESVKGRFTISRDDSKNSLYLQMNSLKTEDTAVYYCRYVHYAAGYGVDAWGQGTTVTVSS

SEQ ID NO: 160 - protein, 122 aa, Artificial
  An artificially generated sequence
QVQLVESGGGLVQPGRSLRLSCAASGFTFSNAWMHWVRQAPGKGLEWVAQIKDKSQNYATYLAESVKGRFTISRDDSKNSLYLQMNSLKTEDTAVYYCRYVHYAAGYGVDAWGQGTTVTVSS

SEQ ID NO: 161 - protein, 122 aa, Artificial
  An artificially generated sequence
QVQLVESGGGLVQPGRSLRLSCAASGFTFSNAWMHWVRQAPGKGLEWVAQIKDKSQNYATYPAESVKGRFTISRDDSKNSLYLQMNSLKTEDTAVYYCRYVHYAAGYGVDAWGQGTTVTVSS

SEQ ID NO: 162 - protein, 122 aa, Artificial
  An artificially generated sequence
QVQLVESGGGLVQPGRSLRLSCAASGFTFSNAWMHWVRQAPGKGLEWVAQIKDKSQNYATYQAESVKGRFTISRDDSKNSLYLQMNSLKTEDTAVYYCRYVHYAAGYGVDAWGQGTTVTVSS

SEQ ID NO: 163 - protein, 122 aa, Artificial
  An artificially generated sequence
QVQLVESGGGLVQPGRSLRLSCAASGFTFSNAWMHWVRQAPGKGLEWVAQIKDKSQNYATYTAESVKGRFTISRDDSKNSLYLQMNSLKTEDTAVYYCRYVHYAAGYGVDAWGQGTTVTVSS

SEQ ID NO: 164 - protein, 122 aa, Artificial
  An artificially generated sequence
QVQLVESGGGLVQPGRSLRLSCAASGFTFSNAWMHWVRQAPGKGLEWVAQIKDKSQNYATYVAESVKGRFTISRDDSKNSLYLQMNSLKTEDTAVYYCRYVHYAAGYGVDAWGQGTTVTVSS

SEQ ID NO: 165 - protein, 122 aa, Artificial
  An artificially generated sequence
QVQLVESGGGVVQPGRSLKLSCAASGFTFSNAWMHWVRQAPGKGLEWVAQIKDKSQNYATYYAESVKGRFTISRDDSKNSLYLQMNSLKTEDTAVYYCRYVHYAAGYGVDAWGQGTTVTVSS

SEQ ID NO: 166 - protein, 122 aa, Artificial
  An artificially generated sequence
QVQLVESGGGVVQPGGSLKLSCAASGFTFSNAWMHWVRQAPGKGLEWVAQIKDKSQNYATYYAESVKGRFTISRADSKNSIYLQMNSLKTEDTAVYYCRYVHYAAGYGVDIWGQGTTVTVSS

SEQ ID NO: 167 - protein, 122 aa, Artificial
  An artificially generated sequence
QVQLVESGGGVVQPGGSLRLSCAASGFTFSNAWMHWVRQAPGKGLEWVAQIKDKSQNYAQYYAESVKGRFTISRADSKNSIYLQMNSLKTEDTAVYYCRYVHYAAGYGVDIWGQGTTVTVSS

SEQ ID NO: 168 - protein, 122 aa, Artificial
  An artificially generated sequence
QVQLVESGGGVVQPGGSLRLSCAASGFTFSNAWMHWVRQAPGKGLEWVAQIKDKSQNYATYVAESVKGRFTISRADSKNSIYLQMNSLKTEDTAVYYCRYVHYAAGYGVDIWGQGTTVTVSS

SEQ ID NO: 169 - protein, 122 aa, Artificial
  An artificially generated sequence
QVQLVESGGGVVQPGGSLRLSCAASGFTFSNAWMHWVRQAPGKGLEWVAQIKDKSQNYASYYAESVKGRFTISRADSKNSIYLQMNSLKTEDTAVYYCRYVHYAAGYGVDIWGQGTTVTVSS

SEQ ID NO: 170 - protein, 115 aa, Artificial
  An artificially generated sequence
QVQLVQSGAEVKKPGASVKVSCKASGYTFTDYEMHWIRQPPGQGLEWIGAIDGDTPDTAYSQKFKGRVTLTADKSTSTAYMELSSLTSEDTAVYYCTRFYSYTYWGQGTLVTVSS

SEQ ID NO: 171 - protein, 115 aa, Artificial
  An artificially generated sequence
QVQLVQSGAEVKKPGASVKVSCKASGYTFTDYEMHWIRQPPGQGLEWIGAIDGKTPDTAESQKFKGRVTLTADKSTSTAYMELSSLTSEDTAVYYCTRFYSYTYWGQGTLVTVSS

SEQ ID NO: 172 - protein, 115 aa, Artificial
  An artificially generated sequence
QVQLVQSGAEVKKPGASVKVSCKASGYTFTDYEMHWIRQPPGQGLEWIGAIDGKTPDTAYEQKFKGRVTLTADKSTSTAYMELSSLTSEDTAVYYCTRFYSYTYWGQGTLVTVSS

SEQ ID NO: 173 - protein, 115 aa, Artificial
  An artificially generated sequence
QVQLVQSGAEVKKPGASVKVSCKASGYTFTDYEMHWIRQPPGQGLEWIGAIDGKTPDTAYSDKFKGRVTLTADKSTSTAYMELSSLTSEDTAVYYCTRFYSYTYWGQGTLVTVSS

SEQ ID NO: 174 - protein, 115 aa, Artificial
  An artificially generated sequence
QVQLVQSGAEVKKPGASVKVSCKASGYTFTDYEMHWIRQPPGQGLEWIGAIDGETPDTAYSQKFKGRVTLTADKSTSTAYMELSSLTSEDTAVYYCTRFYSYTYWGQGTLVTVSS

SEQ ID NO: 175 - protein, 115 aa, Artificial
  An artificially generated sequence
QVQLVQSGAEVKKPGASVKVSCKASGYTFTDYEMHWIRQPPGQGLEWIGAIDGDTPDTAYEQKFKGRVTLTADKSTSTAYMELSSLTSEDTAVYYCTRFYSYTYWGQGTLVTVSS

SEQ ID NO: 176 - protein, 115 aa, Artificial
  An artificially generated sequence
QVQLVQSGAEVKKPGASVKVSCKASGYTFTDYEMHWIRQPPGQGLEWIGAIDGKTPDTAEEQKFKGRVTLTADKSTSTAYMELSSLTSEDTAVYYCTRFYSYTYWGQGTLVTVSS

SEQ ID NO: 177 - protein, 115 aa, Artificial
  An artificially generated sequence
QVQLVQSGAEVKKPGASVTVSCKASGYTFTDYEMHWIRQPPGQGLEWIGAIDGKTPDTAYEQKFKGRVTLTADKSTSTAYMELSSLTSEDTAVYYCTRFYSYTYWGQGTLVTVSS

SEQ ID NO: 178 - protein, 115 aa, Artificial
  An artificially generated sequence
QVQLVQSGAEVKKPGASVKVSCKASGYTFTDYEMHWIRQPPGEGLEWIGAIDGKTPDTAYEQKFKGRVTLTADKSTSTAYMELSSLTSEDTAVYYCTRFYSYTYWGQGTLVTVSS

SEQ ID NO: 179 - protein, 115 aa, Artificial
  An artificially generated sequence
QVQLVQSGAEVKKPGASVKVSCKASGYTFTDYEMHWIRQPPGQGLEWIGAIDGKTPDTAYEESFKGRVTLTADKSTSTAYMELSSLTSEDTAVYYCTRFYSYTYWGQGTLVTVSS

SEQ ID NO: 180 - protein, 115 aa, Artificial
  An artificially generated sequence
QVQLVQSGAEVKKPGASVKVSCKASGYTFTDYEMHWIRQPPGQGLEWIGAIDGKTPDTAYEQKFQDRVTLTADKSTSTAYMELSSLTSEDTAVYYCTRFYSYTYWGQGTLVTVSS

SEQ ID NO: 181 - protein, 115 aa, Artificial
  An artificially generated sequence
QVQLVQSGAEVKKPGASVTVSCKASGYTFTDYEMHWIRQPPGEGLEWIGAIDGKTPDTAYEQKFKGRVTLTADKSTSTAYMELSSLTSEDTAVYYCTRFYSYTYWGQGTLVTVSS

SEQ ID NO: 182 - protein, 115 aa, Artificial
  An artificially generated sequence
QVQLVQSGAEVKKPGASVTVSCKASGYTFTDYEMHWIRQPPGQGLEWIGAIDGETPDTAYSQKFKGRVTLTADKSTSTAYMELSSLTSEDTAVYYCTRFYSYTYWGQGTLVTVSS

SEQ ID NO: 183 - protein, 115 aa, Artificial
  An artificially generated sequence
QVQLVQSGAEVKKPGASVKVSCKASGYTFTDYEMHWIRQPPGEGLEWIGAIDGETPDTAYSQKFKGRVTLTADKSTSTAYMELSSLTSEDTAVYYCTRFYSYTYWGQGTLVTVSS

SEQ ID NO: 184 - protein, 115 aa, Artificial
  An artificially generated sequence
QVQLVQSGAEVKKPGASVTVSCKASGYTFTDYEMHWIRQPPGEGLEWIGAIDGETPDTAYSQKFKGRVTLTADKSTSTAYMELSSLTSEDTAVYYCTRFYSYTYWGQGTLVTVSS

SEQ ID NO: 185 - protein, 115 aa, Artificial
  An artificially generated sequence
QVQLVQSGAEVKKPGASVKVSCKASGYTFTDYEMHWIRQPPGQGLEWIGAIDGETPDTAYSESFKGRVTLTADKSTSTAYMELSSLTSEDTAVYYCTRFYSYTYWGQGTLVTVSS

SEQ ID NO: 186 - protein, 115 aa, Artificial
  An artificially generated sequence
QVQLVQSGAEVKKPGASVKVSCKASGYEFTDYEMHWIRQPPGQGLEWIGAIDGKTPDTAYSQKFKGRVTLTADKSTSTAYMELSSLTSEDTAVYYCTRFYSYTYWGQGTLVTVSS

SEQ ID NO: 187 - protein, 115 aa, Artificial
  An artificially generated sequence
QVQLVQSGAEVKKPGASVKVSCKASGYTFEDYEMHWIRQPPGQGLEWIGAIDGKTPDTAYSQKFKGRVTLTADKSTSTAYMELSSLTSEDTAVYYCTRFYSYTYWGQGTLVTVSS

SEQ ID NO: 188 - protein, 115 aa, Artificial
  An artificially generated sequence
QVQLVQSGAEVKKPGASVKVSCKASGYTFTDYEMHWIRQPPGQGLEWIGAIDGKTPDTAYSEKFKGRVTLTADKSTSTAYMELSSLTSEDTAVYYCTRFYSYTYWGQGTLVTVSS

SEQ ID NO: 189 - protein, 115 aa, Artificial
  An artificially generated sequence
QVQLVQSGAEVKKPGASVKVSCKASGYTFTDYEMHWIRQPPGQGLEWIGAIDGKTPDTAYSQKFEGRVTLTADKSTSTAYMELSSLTSEDTAVYYCTRFYSYTYWGQGTLVTVSS

SEQ ID NO: 190 - protein, 115 aa, Artificial
  An artificially generated sequence
QVQLVQSGAEVKKPGASVKVSCKASGYTFTDYEMHWIRQPPGQGLEWIGAIDGKTPDTAYSQKFKGRVELTADKSTSTAYMELSSLTSEDTAVYYCTRFYSYTYWGQGTLVTVSS

SEQ ID NO: 191 - protein, 115 aa, Artificial
  An artificially generated sequence
QVQLVQSGAEVKKPGASVKVSCKASGYTFTDYEMHWIRQPPGQGLEWIGAIDGKTPDTAYSQKFKGRVTLTADKSTSTAYMELESLTSEDTAVYYCTRFYSYTYWGQGTLVTVSS

SEQ ID NO: 192 - protein, 115 aa, Artificial
  An artificially generated sequence
QVQLVQSGAEVKKPGASVKVSCKASGYTFTDYEMHWIRQPPGQGLEWIGAIDGKTPDTAYSQKFKGRVTLTADKSTSTAYMELSELTSEDTAVYYCTRFYSYTYWGQGTLVTVSS

SEQ ID NO: 193 - protein, 115 aa, Artificial
  An artificially generated sequence
QVQLVQSGAEVKKPGASVKVSCKASGYTFTDYEMHWIRQPPGQGLEWIGAIDGKTPDTAYSQKFKGRVTLTADKSTSTAYMELSSLTEEDTAVYYCTRFYSYTYWGQGTLVTVSS

SEQ ID NO: 194 - protein, 115 aa, Artificial
  An artificially generated sequence
QVQLVQSGAEVKKPGASVKVSCKASGYTFTDYEMHWIRQPPGQGLEWIGAIDGKTPDTAYSQKFKGRVTLTADKSTSTAYMELSSLTSEDEAVYYCTRFYSYTYWGQGTLVTVSS

SEQ ID NO: 195 - protein, 115 aa, Artificial
  An artificially generated sequence
QVQLVQSGAEVKKPGASVKVSCKASGYTFTDYEMHWIRQPPGQGLEWIGAIDGKTPDTAYSQKFKGRVTLTADKSTSTAYMELSSLTSEDTAEYYCTRFYSYTYWGQGTLVTVSS

SEQ ID NO: 196 - protein, 115 aa, Artificial
  An artificially generated sequence
QVQLVQSGAEVKKPGASVTVSCKASGYTFTDYEMHWIRQPPGEGLEWIGAIDGETPDTAYEQKFKGRVTLTADKSTSTAYMELSSLTSEDTAVYYCTRFYSYTYWGQGTLVTVSS

SEQ ID NO: 197 - protein, 115 aa, Artificial
  An artificially generated sequence
QVQLVQSGAEVKKPGASVTVSCKASGYTFTDYEMHWIRQPPGEGLEWIGAIDGETPDTAYSEKFKGRVTLTADKSTSTAYMELSSLTSEDTAVYYCTRFYSYTYWGQGTLVTVSS

SEQ ID NO: 198 - protein, 115 aa, Artificial
  An artificially generated sequence
QVQLVQSGAEVKKPGASVTVSCKASGYTFTDYEMHWIRQPPGEGLEWIGAIDGETPDTAYSDKFKGRVTLTADKSTSTAYMELSSLTSEDTAVYYCTRFYSYTYWGQGTLVTVSS

SEQ ID NO: 199 - protein, 115 aa, Artificial
  An artificially generated sequence
QVQLVQSGAEVKKPGASVTVSCKASGYTFTDYEMHWIRQPPGEGLEWIGAIDGETPDTAYSQKFEGRVTLTADKSTSTAYMELSSLTSEDTAVYYCTRFYSYTYWGQGTLVTVSS

SEQ ID NO: 200 - protein, 115 aa, Artificial
  An artificially generated sequence
QVQLVQSGAEVKKPGASVTVSCKASGYTFTDYEMHWIRQPPGEGLEWIGAIDGETPDTAYSEKFEGRVTLTADKSTSTAYMELSSLTSEDTAVYYCTRFYSYTYWGQGTLVTVSS

SEQ ID NO: 201 - protein, 115 aa, Artificial
  An artificially generated sequence
QVQLVQSGAEVKKPGASVTVSCKASGYTFTDYEMHWIRQPPGEGLEWIGAIDGETPDTAYSQKFEGRVTLTADKSTSTAYMELSSLTEEDTAVYYCTRFYSYTYWGQGTLVTVSS

SEQ ID NO: 202 - protein, 115 aa, Artificial
  An artificially generated sequence
QVQLVQSGAEVKKPGASVTVSCKASGYTFEDYEMHWIRQPPGEGLEWIGAIDGETPDTAYSQKFEGRVTLTADKSTSTAYMELSSLTEEDTAVYYCTRFYSYTYWGQGTLVTVSS

SEQ ID NO: 203 - protein, 115 aa, Artificial
  An artificially generated sequence
QVQLVQSGAEVKKPGASVKVSCKASGYTFTDYEMHWVRQAPGQGLEWIGAIDGKTPDTAYSQKFKGRVTLTADKSTSTAYMELSSLTSEDTAVYYCTRFYSYTYWGQGTLVTVSS

SEQ ID NO: 204 - protein, 115 aa, Artificial
  An artificially generated sequence
QVQLVQSGAEVKKPGASVKVSCKASGYTFTDYEMHWIRQPPGQGLEWMGAIDGKTPDTAYSQKFKGRVTLTADKSTSTAYMELSSLTSEDTAVYYCTRFYSYTYWGQGTLVTVSS

SEQ ID NO: 205 - protein, 115 aa, Artificial
  An artificially generated sequence
QVQLVQSGAEVKKPGASVKVSCKASGYTFTDYEMHWIRQPPGQGLEWIGAIDGKTPDTAYSQKFKGRVTLTADKSTSTAYMELSSLRSEDTAVYYCTRFYSYTYWGQGTLVTVSS

SEQ ID NO: 206 - protein, 115 aa, Artificial
  An artificially generated sequence
QVQLVQSGAEVKKPGASVTVSCKASGYTFTDYEMHWIRQPPGEGLEWIGAIDGPTPDTAYSEKFKGRVTLTADKSTSTAYMELSSLTSEDTAVYYCTRFYSYTYWGQGTLVTVSS

SEQ ID NO: 207 - protein, 115 aa, Artificial
  An artificially generated sequence
QVQLVQSGAEVKKPGASVTVSCKASGYTFTDYEMHWIRQPPGEGLEWIGAIDGWTPDTAYSEKFKGRVTLTADKSTSTAYMELSSLTSEDTAVYYCTRFYSYTYWGQGTLVTVSS

SEQ ID NO: 208 - protein, 115 aa, Artificial
  An artificially generated sequence
QVQLVQSGAEVKKPGASVTVSCKASGYTFTDYEMHWIRQPPGEGLEWIGAIDGYTPDTAYSEKFKGRVTLTADKSTSTAYMELSSLTSEDTAVYYCTRFYSYTYWGQGTLVTVSS

SEQ ID NO: 209 - protein, 115 aa, Artificial
  An artificially generated sequence
QVQLVQSGAEVKKPGASVTVSCKASGYTFTDYEMHWIRQPPGEGLEWIGAIDGKTPDTAYSEKFKGRVTLTADKSTSTAYMELSSLTSEDTAVYYCTRFYSYTYWGQGTLVTVSS

SEQ ID NO: 210 - protein, 115 aa, Artificial
  An artificially generated sequence
QVQLVQSGAEVKKPGASVTVSCKASGYTFTDYEMHWIRQPPGEGLEWIGAIDGPTPDTAYSQKFEGRVTLTADKSTSTAYMELSSLTSEDTAVYYCTRFYSYTYWGQGTLVTVSS

SEQ ID NO: 211 - protein, 115 aa, Artificial
  An artificially generated sequence
QVQLVQSGAEVKKPGASVTVSCKASGYTFTDYEMHWVRQAPGEGLEWMGAIDGETPDTAYSEKFKGRVTLTADKSTSTAYMELSSLTSEDTAVYYCTRFYSYTYWGQGTLVTVSS

SEQ ID NO: 212 - protein, 115 aa, Artificial
  An artificially generated sequence
QVQLVQSGAEVKKPGASVTVSCKASGYTFTDYEMHWVRQAPGEGLEWMGAIDGPTPDTAYSEKFKGRVTLTADKSTSTAYMELSSLTSEDTAVYYCTRFYSYTYWGQGTLVTVSS

SEQ ID NO: 213 - protein, 115 aa, Artificial
  An artificially generated sequence
QVQLVQSGAEVKKPGASVTVSCKASGYTFTDYEMHWVRQAPGEGLEWMGAIDGWTPDTAYSEKFKGRVTLTADKSTSTAYMELSSLTSEDTAVYYCTRFYSYTYWGQGTLVTVSS

SEQ ID NO: 214 - protein, 115 aa, Artificial
  An artificially generated sequence
QVQLVQSGAEVKKPGASVTVSCKASGYTFTDYEMHWVRQAPGEGLEWMGAIDGYTPDTAYSEKFKGRVTLTADKSTSTAYMELSSLTSEDTAVYYCTRFYSYTYWGQGTLVTVSS

SEQ ID NO: 215 - protein, 115 aa, Artificial
  An artificially generated sequence
QVQLVQSGAEVKKPGASVKVSCKASGYTFTDYEMHWIRQPPGQGLEWIGAIDGKTPDTAYSQKFKGRVTLTADKSTSTAYMELSSLTSEDTAVYYCTRFYSYTYWGQGTLVTVSS

SEQ ID NO: 216 - protein, 112 aa, Artificial
  An artificially generated sequence
DIQMTQSPSSLSASVGDRVTITCRSSQSLVHSNRNTYLHWYQQKPGKAPKLLIYKVSNRFSGVPSRFSGSGSGTDFTFTISSLQPEDIATYYCGQGTQVPYTFGQGTKVEIK

SEQ ID NO: 217 - protein, 112 aa, Artificial
  An artificially generated sequence
DIVMTQSPLSLPVTPGEPASISCRASQSLVHSNRNTYLHWYQQKPGQAPRLLIYKVSNRFSGVPDRFSGSGSGTDFTLKISRVEAEDVGVYYCGQGTQVPYTFGQGTKLEIK

SEQ ID NO: 218 - protein, 112 aa, Artificial
  An artificially generated sequence
DIVMTQSPLSLPVTPGEPASISCRISQSLVHSNRNTYLHWYQQKPGQAPRLLIYKVSNRFSGVPDRFSGSGSGTDFTLKISRVEAEDVGVYYCGQGTQVPYTFGQGTKLEIK

SEQ ID NO: 219 - protein, 112 aa, Artificial
  An artificially generated sequence
DIVMTQSPLSLPVTPGEPASISCRPSQSLVHSNRNTYLHWYQQKPGQAPRLLIYKVSNRFSGVPDRFSGSGSGTDFTLKISRVEAEDVGVYYCGQGTQVPYTFGQGTKLEIK

SEQ ID NO: 220 - protein, 112 aa, Artificial
  An artificially generated sequence
DIVMTQSPLSLPVTPGEPASISCRTSQSLVHSNRNTYLHWYQQKPGQAPRLLIYKVSNRFSGVPDRFSGSGSGTDFTLKISRVEAEDVGVYYCGQGTQVPYTFGQGTKLEIK

SEQ ID NO: 221 - protein, 112 aa, Artificial
  An artificially generated sequence
DIVMTQSPLSLPVTPGEPASISCRVSQSLVHSNRNTYLHWYQQKPGQAPRLLIYKVSNRFSGVPDRFSGSGSGTDFTLKISRVEAEDVGVYYCGQGTQVPYTFGQGTKLEIK

SEQ ID NO: 222 - protein, 112 aa, Artificial
  An artificially generated sequence
DIVMTQSPLSLPVTPGEPASISCRSPQSLVHSNRNTYLHWYQQKPGQAPRLLIYKVSNRFSGVPDRFSGSGSGTDFTLKISRVEAEDVGVYYCGQGTQVPYTFGQGTKLEIK

SEQ ID NO: 223 - protein, 112 aa, Artificial
  An artificially generated sequence
DIVMTQSPLSLPVTPGEPASISCRSSQPLVHSNRNTYLHWYQQKPGQAPRLLIYKVSNRFSGVPDRFSGSGSGTDFTLKISRVEAEDVGVYYCGQGTQVPYTFGQGTKLEIK

SEQ ID NO: 224 - protein, 112 aa, Artificial
  An artificially generated sequence
DIVMTQSPLSLPVTPGEPASISCRSSQSFVHSNRNTYLHWYQQKPGQAPRLLIYKVSNRFSGVPDRFSGSGSGTDFTLKISRVEAEDVGVYYCGQGTQVPYTFGQGTKLEIK

SEQ ID NO: 225 - protein, 112 aa, Artificial
  An artificially generated sequence
DIVMTQSPLSLPVTPGEPASISCRSSQSIVHSNRNTYLHWYQQKPGQAPRLLIYKVSNRFSGVPDRFSGSGSGTDFTLKISRVEAEDVGVYYCGQGTQVPYTFGQGTKLEIK

SEQ ID NO: 226 - protein, 112 aa, Artificial
  An artificially generated sequence
DIVMTQSPLSLPVTPGEPASISCRSSQSMVHSNRNTYLHWYQQKPGQAPRLLIYKVSNRFSGVPDRFSGSGSGTDFTLKISRVEAEDVGVYYCGQGTQVPYTFGQGTKLEIK

SEQ ID NO: 227 - protein, 112 aa, Artificial
  An artificially generated sequence
DIVMTQSPLSLPVTPGEPASISCRSSQSPVHSNRNTYLHWYQQKPGQAPRLLIYKVSNRFSGVPDRFSGSGSGTDFTLKISRVEAEDVGVYYCGQGTQVPYTFGQGTKLEIK

SEQ ID NO: 228 - protein, 112 aa, Artificial
  An artificially generated sequence
DIVMTQSPLSLPVTPGEPASISCRSSQSVVHSNRNTYLHWYQQKPGQAPRLLIYKVSNRFSGVPDRFSGSGSGTDFTLKISRVEAEDVGVYYCGQGTQVPYTFGQGTKLEIK

SEQ ID NO: 229 - protein, 112 aa, Artificial
  An artificially generated sequence
DIVMTQSPLSLPVTPGEPASISCRSSQSLVRSNRNTYLHWYQQKPGQAPRLLIYKVSNRFSGVPDRFSGSGSGTDFTLKISRVEAEDVGVYYCGQGTQVPYTFGQGTKLEIK

SEQ ID NO: 230 - protein, 112 aa, Artificial
  An artificially generated sequence
DIVMTQSPLSLPVTPGEPASISCRSSQSLVHFNRNTYLHWYQQKPGQAPRLLIYKVSNRFSGVPDRFSGSGSGTDFTLKISRVEAEDVGVYYCGQGTQVPYTFGQGTKLEIK

SEQ ID NO: 231 - protein, 112 aa, Artificial
  An artificially generated sequence
DIVMTQSPLSLPVTPGEPASISCRSSQSLVHHNRNTYLHWYQQKPGQAPRLLIYKVSNRFSGVPDRFSGSGSGTDFTLKISRVEAEDVGVYYCGQGTQVPYTFGQGTKLEIK

SEQ ID NO: 232 - protein, 112 aa, Artificial
  An artificially generated sequence
DIVMTQSPLSLPVTPGEPASISCRSSQSLVHLNRNTYLHWYQQKPGQAPRLLIYKVSNRFSGVPDRFSGSGSGTDFTLKISRVEAEDVGVYYCGQGTQVPYTFGQGTKLEIK

SEQ ID NO: 233 - protein, 112 aa, Artificial
  An artificially generated sequence
DIVMTQSPLSLPVTPGEPASISCRSSQSLVHMNRNTYLHWYQQKPGQAPRLLIYKVSNRFSGVPDRFSGSGSGTDFTLKISRVEAEDVGVYYCGQGTQVPYTFGQGTKLEIK

SEQ ID NO: 234 - protein, 112 aa, Artificial
  An artificially generated sequence
DIVMTQSPLSLPVTPGEPASISCRSSQSLVHNNRNTYLHWYQQKPGQAPRLLIYKVSNRFSGVPDRFSGSGSGTDFTLKISRVEAEDVGVYYCGQGTQVPYTFGQGTKLEIK

SEQ ID NO: 235 - protein, 112 aa, Artificial
  An artificially generated sequence
DIVMTQSPLSLPVTPGEPASISCRSSQSLVHPNRNTYLHWYQQKPGQAPRLLIYKVSNRFSGVPDRFSGSGSGTDFTLKISRVEAEDVGVYYCGQGTQVPYTFGQGTKLEIK

SEQ ID NO: 236 - protein, 112 aa, Artificial
  An artificially generated sequence
DIVMTQSPLSLPVTPGEPASISCRSSQSLVHQNRNTYLHWYQQKPGQAPRLLIYKVSNRFSGVPDRFSGSGSGTDFTLKISRVEAEDVGVYYCGQGTQVPYTFGQGTKLEIK

SEQ ID NO: 237 - protein, 112 aa, Artificial
  An artificially generated sequence
DIVMTQSPLSLPVTPGEPASISCRSSQSLVHVNRNTYLHWYQQKPGQAPRLLIYKVSNRFSGVPDRFSGSGSGTDFTLKISRVEAEDVGVYYCGQGTQVPYTFGQGTKLEIK

SEQ ID NO: 238 - protein, 112 aa, Artificial
  An artificially generated sequence
DIVMTQSPLSLPVTPGEPASISCRSSQSLVHWNRNTYLHWYQQKPGQAPRLLIYKVSNRFSGVPDRFSGSGSGTDFTLKISRVEAEDVGVYYCGQGTQVPYTFGQGTKLEIK

SEQ ID NO: 239 - protein, 112 aa, Artificial
  An artificially generated sequence
DIVMTQSPLSLPVTPGEPASISCRSSQSLVHSNRDTYLHWYQQKPGQAPRLLIYKVSNRFSGVPDRFSGSGSGTDFTLKISRVEAEDVGVYYCGQGTQVPYTFGQGTKLEIK

SEQ ID NO: 240 - protein, 112 aa, Artificial
  An artificially generated sequence
DIVMTQSPLSLPVTPGEPASISCRSSQSLVHSNRETYLHWYQQKPGQAPRLLIYKVSNRFSGVPDRFSGSGSGTDFTLKISRVEAEDVGVYYCGQGTQVPYTFGQGTKLEIK

SEQ ID NO: 241 - protein, 112 aa, Artificial
  An artificially generated sequence
DIVMTQSPLSLPVTPGEPASISCRSSQSLVHSNRFTYLHWYQQKPGQAPRLLIYKVSNRFSGVPDRFSGSGSGTDFTLKISRVEAEDVGVYYCGQGTQVPYTFGQGTKLEIK

SEQ ID NO: 242 - protein, 112 aa, Artificial
  An artificially generated sequence
DIVMTQSPLSLPVTPGEPASISCRSSQSLVHSNRGTYLHWYQQKPGQAPRLLIYKVSNRFSGVPDRFSGSGSGTDFTLKISRVEAEDVGVYYCGQGTQVPYTFGQGTKLEIK

SEQ ID NO: 243 - protein, 112 aa, Artificial
  An artificially generated sequence
DIVMTQSPLSLPVTPGEPASISCRSSQSLVHSNRHTYLHWYQQKPGQAPRLLIYKVSNRFSGVPDRFSGSGSGTDFTLKISRVEAEDVGVYYCGQGTQVPYTFGQGTKLEIK

SEQ ID NO: 244 - protein, 112 aa, Artificial
  An artificially generated sequence
DIVMTQSPLSLPVTPGEPASISCRSSQSLVHSNRMTYLHWYQQKPGQAPRLLIYKVSNRFSGVPDRFSGSGSGTDFTLKISRVEAEDVGVYYCGQGTQVPYTFGQGTKLEIK

SEQ ID NO: 245 - protein, 112 aa, Artificial
  An artificially generated sequence
DIVMTQSPLSLPVTPGEPASISCRSSQSLVHSNRWTYLHWYQQKPGQAPRLLIYKVSNRFSGVPDRFSGSGSGTDFTLKISRVEAEDVGVYYCGQGTQVPYTFGQGTKLEIK

SEQ ID NO: 246 - protein, 112 aa, Artificial
  An artificially generated sequence
DIVMTQSPLSLPVTPGEPASISCRSSQSLVHSNRNTYIHWYQQKPGQAPRLLIYKVSNRFSGVPDRFSGSGSGTDFTLKISRVEAEDVGVYYCGQGTQVPYTFGQGTKLEIK

SEQ ID NO: 247 - protein, 112 aa, Artificial
  An artificially generated sequence
DIVMTQSPLSLPVTPGEPASISCRSSQSLVHSNRNTYVHWYQQKPGQAPRLLIYKVSNRFSGVPDRFSGSGSGTDFTLKISRVEAEDVGVYYCGQGTQVPYTFGQGTKLEIK

SEQ ID NO: 248 - protein, 112 aa, Artificial
  An artificially generated sequence
DIVMTQSPLSLPVTPGEPASISCRSSQSLVHSNRNTYLEWYQQKPGQAPRLLIYKVSNRFSGVPDRFSGSGSGTDFTLKISRVEAEDVGVYYCGQGTQVPYTFGQGTKLEIK

SEQ ID NO: 249 - protein, 112 aa, Artificial
  An artificially generated sequence
DIVMTQSPLSLPVTPGEPASISCRSSQSLVHSNRNTYLLWYQQKPGQAPRLLIYKVSNRFSGVPDRFSGSGSGTDFTLKISRVEAEDVGVYYCGQGTQVPYTFGQGTKLEIK

SEQ ID NO: 250 - protein, 112 aa, Artificial
  An artificially generated sequence
DIVMTQSPLSLPVTPGEPASISCRSSQSLVHSNRNTYLMWYQQKPGQAPRLLIYKVSNRFSGVPDRFSGSGSGTDFTLKISRVEAEDVGVYYCGQGTQVPYTFGQGTKLEIK

SEQ ID NO: 251 - protein, 112 aa, Artificial
  An artificially generated sequence
DIVMTQSPLSLPVTPGEPASISCRSSQSLVHSNRNTYLNWYQQKPGQAPRLLIYKVSNRFSGVPDRFSGSGSGTDFTLKISRVEAEDVGVYYCGQGTQVPYTFGQGTKLEIK

SEQ ID NO: 252 - protein, 112 aa, Artificial
  An artificially generated sequence
DIVMTQSPLSLPVTPGEPASISCRSSQSLVHSNRNTYLQWYQQKPGQAPRLLIYKVSNRFSGVPDRFSGSGSGTDFTLKISRVEAEDVGVYYCGQGTQVPYTFGQGTKLEIK

SEQ ID NO: 253 - protein, 112 aa, Artificial
  An artificially generated sequence
DIVMTQSPLSLPVTPGEPASISCRSSQSLVHSNRNTYLHWYQQKPGQAPRLLIYKVSFRFSGVPDRFSGSGSGTDFTLKISRVEAEDVGVYYCGQGTQVPYTFGQGTKLEIK

SEQ ID NO: 254 - protein, 112 aa, Artificial
  An artificially generated sequence
DIVMTQSPLSLPVTPGEPASISCRSSQSLVHSNRNTYLHWYQQKPGQAPRLLIYKVSHRFSGVPDRFSGSGSGTDFTLKISRVEAEDVGVYYCGQGTQVPYTFGQGTKLEIK

SEQ ID NO: 255 - protein, 112 aa, Artificial
  An artificially generated sequence
DIVMTQSPLSLPVTPGEPASISCRSSQSLVHSNRNTYLHWYQQKPGQAPRLLIYKVSIRFSGVPDRFSGSGSGTDFTLKISRVEAEDVGVYYCGQGTQVPYTFGQGTKLEIK

SEQ ID NO: 256 - protein, 112 aa, Artificial
  An artificially generated sequence
DIVMTQSPLSLPVTPGEPASISCRSSQSLVHSNRNTYLHWYQQKPGQAPRLLIYKVSMRFSGVPDRFSGSGSGTDFTLKISRVEAEDVGVYYCGQGTQVPYTFGQGTKLEIK

SEQ ID NO: 257 - protein, 112 aa, Artificial
  An artificially generated sequence
DIVMTQSPLSLPVTPGEPASISCRSSQSLVHSNRNTYLHWYQQKPGQAPRLLIYKVSTRFSGVPDRFSGSGSGTDFTLKISRVEAEDVGVYYCGQGTQVPYTFGQGTKLEIK

SEQ ID NO: 258 - protein, 112 aa, Artificial
  An artificially generated sequence
DIVMTQSPLSLPVTPGEPASISCRSSQSLVHSNRNTYLHWYQQKPGQAPRLLIYKVSWRFSGVPDRFSGSGSGTDFTLKISRVEAEDVGVYYCGQGTQVPYTFGQGTKLEIK

SEQ ID NO: 259 - protein, 112 aa, Artificial
  An artificially generated sequence
DIVMTQSPLSLPVTPGEPASISCRSSQSLVHSNRNTYLHWYQQKPGQAPRLLIYKVSNRASGVPDRFSGSGSGTDFTLKISRVEAEDVGVYYCGQGTQVPYTFGQGTKLEIK

SEQ ID NO: 260 - protein, 112 aa, Artificial
  An artificially generated sequence
DIVMTQSPLSLPVTPGEPASISCRSSQSLVHSNRNTYLHWYQQKPGQAPRLLIYKVSNRGSGVPDRFSGSGSGTDFTLKISRVEAEDVGVYYCGQGTQVPYTFGQGTKLEIK

SEQ ID NO: 261 - protein, 112 aa, Artificial
  An artificially generated sequence
DIVMTQSPLSLPVTPGEPASISCRSSQSLVHSNRNTYLHWYQQKPGQAPRLLIYKVSNRISGVPDRFSGSGSGTDFTLKISRVEAEDVGVYYCGQGTQVPYTFGQGTKLEIK

SEQ ID NO: 262 - protein, 112 aa, Artificial
  An artificially generated sequence
DIVMTQSPLSLPVTPGEPASISCRSSQSLVHSNRNTYLHWYQQKPGQAPRLLIYKVSNRKSGVPDRFSGSGSGTDFTLKISRVEAEDVGVYYCGQGTQVPYTFGQGTKLEIK

SEQ ID NO: 263 - protein, 112 aa, Artificial
  An artificially generated sequence
DIVMTQSPLSLPVTPGEPASISCRSSQSLVHSNRNTYLHWYQQKPGQAPRLLIYKVSNRLSGVPDRFSGSGSGTDFTLKISRVEAEDVGVYYCGQGTQVPYTFGQGTKLEIK

SEQ ID NO: 264 - protein, 112 aa, Artificial
  An artificially generated sequence
DIVMTQSPLSLPVTPGEPASISCRSSQSLVHSNRNTYLHWYQQKPGQAPRLLIYKVSNRMSGVPDRFSGSGSGTDFTLKISRVEAEDVGVYYCGQGTQVPYTFGQGTKLEIK

SEQ ID NO: 265 - protein, 112 aa, Artificial
  An artificially generated sequence
DIVMTQSPLSLPVTPGEPASISCRSSQSLVHSNRNTYLHWYQQKPGQAPRLLIYKVSNRNSGVPDRFSGSGSGTDFTLKISRVEAEDVGVYYCGQGTQVPYTFGQGTKLEIK

SEQ ID NO: 266 - protein, 112 aa, Artificial
  An artificially generated sequence
DIVMTQSPLSLPVTPGEPASISCRSSQSLVHSNRNTYLHWYQQKPGQAPRLLIYKVSNRPSGVPDRFSGSGSGTDFTLKISRVEAEDVGVYYCGQGTQVPYTFGQGTKLEIK

SEQ ID NO: 267 - protein, 112 aa, Artificial
  An artificially generated sequence
DIVMTQSPLSLPVTPGEPASISCRSSQSLVHSNRNTYLHWYQQKPGQAPRLLIYKVSNRRSGVPDRFSGSGSGTDFTLKISRVEAEDVGVYYCGQGTQVPYTFGQGTKLEIK

SEQ ID NO: 268 - protein, 112 aa, Artificial
  An artificially generated sequence
DIVMTQSPLSLPVTPGEPASISCRSSQSLVHSNRNTYLHWYQQKPGQAPRLLIYKVSNRVSGVPDRFSGSGSGTDFTLKISRVEAEDVGVYYCGQGTQVPYTFGQGTKLEIK

SEQ ID NO: 269 - protein, 112 aa, Artificial
  An artificially generated sequence
DIVMTQSPLSLPVTPGEPASISCRSSQSLVHSNRNTYLHWYQQKPGQAPRLLIYKVSNRYSGVPDRFSGSGSGTDFTLKISRVEAEDVGVYYCGQGTQVPYTFGQGTKLEIK

SEQ ID NO: 270 - protein, 112 aa, Artificial
  An artificially generated sequence
DIVMTQSPLSLPVTPGEPASISCRSSQSLVHSNRNTYLHWYQQKPGQAPRLLIYKVSNRFFGVPDRFSGSGSGTDFTLKISRVEAEDVGVYYCGQGTQVPYTFGQGTKLEIK

SEQ ID NO: 271 - protein, 112 aa, Artificial
  An artificially generated sequence
DIVMTQSPLSLPVTPGEPASISCRSSQSLVHSNRNTYLHWYQQKPGQAPRLLIYKVSNRFGGVPDRFSGSGSGTDFTLKISRVEAEDVGVYYCGQGTQVPYTFGQGTKLEIK

SEQ ID NO: 272 - protein, 112 aa, Artificial
  An artificially generated sequence
DIVMTQSPLSLPVTPGEPASISCRSSQSLVHSNRNTYLHWYQQKPGQAPRLLIYKVSNRFHGVPDRFSGSGSGTDFTLKISRVEAEDVGVYYCGQGTQVPYTFGQGTKLEIK

SEQ ID NO: 273 - protein, 112 aa, Artificial
  An artificially generated sequence
DIVMTQSPLSLPVTPGEPASISCRSSQSLVHSNRNTYLHWYQQKPGQAPRLLIYKVSNRFIGVPDRFSGSGSGTDFTLKISRVEAEDVGVYYCGQGTQVPYTFGQGTKLEIK

SEQ ID NO: 274 - protein, 112 aa, Artificial
  An artificially generated sequence
DIVMTQSPLSLPVTPGEPASISCRSSQSLVHSNRNTYLHWYQQKPGQAPRLLIYKVSNRFLGVPDRFSGSGSGTDFTLKISRVEAEDVGVYYCGQGTQVPYTFGQGTKLEIK

SEQ ID NO: 275 - protein, 112 aa, Artificial
  An artificially generated sequence
DIVMTQSPLSLPVTPGEPASISCRSSQSLVHSNRNTYLHWYQQKPGQAPRLLIYKVSNRFMGVPDRFSGSGSGTDFTLKISRVEAEDVGVYYCGQGTQVPYTFGQGTKLEIK

SEQ ID NO: 276 - protein, 112 aa, Artificial
  An artificially generated sequence
DIVMTQSPLSLPVTPGEPASISCRSSQSLVHSNRNTYLHWYQQKPGQAPRLLIYKVSNRFPGVPDRFSGSGSGTDFTLKISRVEAEDVGVYYCGQGTQVPYTFGQGTKLEIK

SEQ ID NO: 277 - protein, 112 aa, Artificial
  An artificially generated sequence
DIVMTQSPLSLPVTPGEPASISCRSSQSLVHSNRNTYLHWYQQKPGQAPRLLIYKVSNRFQGVPDRFSGSGSGTDFTLKISRVEAEDVGVYYCGQGTQVPYTFGQGTKLEIK

SEQ ID NO: 278 - protein, 112 aa, Artificial
  An artificially generated sequence
DIVMTQSPLSLPVTPGEPASISCRSSQSLVHSNRNTYLHWYQQKPGQAPRLLIYKVSNRFRGVPDRFSGSGSGTDFTLKISRVEAEDVGVYYCGQGTQVPYTFGQGTKLEIK

SEQ ID NO: 279 - protein, 112 aa, Artificial
  An artificially generated sequence
DIVMTQSPLSLPVTPGEPASISCRSSQSLVHSNRNTYLHWYQQKPGQAPRLLIYKVSNRFVGVPDRFSGSGSGTDFTLKISRVEAEDVGVYYCGQGTQVPYTFGQGTKLEIK

SEQ ID NO: 280 - protein, 112 aa, Artificial
  An artificially generated sequence
DIVMTQSPLSLPVTPGEPASISCRSSQSLVHSNRNTYLHWYQQKPGQAPRLLIYKVSNRFWGVPDRFSGSGSGTDFTLKISRVEAEDVGVYYCGQGTQVPYTFGQGTKLEIK

SEQ ID NO: 281 - protein, 112 aa, Artificial
  An artificially generated sequence
DIVMTQSPLSLPVTPGEPASISCRSSQSLVHSNRNTYLHWYQQKPGQAPRLLIYKVSNRFSGVPDRFSGSGSGTDFTLKISRVEAEDVGVYYCAQGTQVPYTFGQGTKLEIK

SEQ ID NO: 282 - protein, 112 aa, Artificial
  An artificially generated sequence
DIVMTQSPLSLPVTPGEPASISCRSSQSLVHSNRNTYLHWYQQKPGQAPRLLIYKVSNRFSGVPDRFSGSGSGTDFTLKISRVEAEDVGVYYCEQGTQVPYTFGQGTKLEIK

SEQ ID NO: 283 - protein, 112 aa, Artificial
  An artificially generated sequence
DIVMTQSPLSLPVTPGEPASISCRSSQSLVHSNRNTYLHWYQQKPGQAPRLLIYKVSNRFSGVPDRFSGSGSGTDFTLKISRVEAEDVGVYYCFQGTQVPYTFGQGTKLEIK

SEQ ID NO: 284 - protein, 112 aa, Artificial
  An artificially generated sequence
DIVMTQSPLSLPVTPGEPASISCRSSQSLVHSNRNTYLHWYQQKPGQAPRLLIYKVSNRFSGVPDRFSGSGSGTDFTLKISRVEAEDVGVYYCIQGTQVPYTFGQGTKLEIK

SEQ ID NO: 285 - protein, 112 aa, Artificial
  An artificially generated sequence
DIVMTQSPLSLPVTPGEPASISCRSSQSLVHSNRNTYLHWYQQKPGQAPRLLIYKVSNRFSGVPDRFSGSGSGTDFTLKISRVEAEDVGVYYCLQGTQVPYTFGQGTKLEIK

SEQ ID NO: 286 - protein, 112 aa, Artificial
  An artificially generated sequence
DIVMTQSPLSLPVTPGEPASISCRSSQSLVHSNRNTYLHWYQQKPGQAPRLLIYKVSNRFSGVPDRFSGSGSGTDFTLKISRVEAEDVGVYYCNQGTQVPYTFGQGTKLEIK

SEQ ID NO: 287 - protein, 112 aa, Artificial
  An artificially generated sequence
DIVMTQSPLSLPVTPGEPASISCRSSQSLVHSNRNTYLHWYQQKPGQAPRLLIYKVSNRFSGVPDRFSGSGSGTDFTLKISRVEAEDVGVYYCTQGTQVPYTFGQGTKLEIK

SEQ ID NO: 288 - protein, 112 aa, Artificial
  An artificially generated sequence
DIVMTQSPLSLPVTPGEPASISCRSSQSLVHSNRNTYLHWYQQKPGQAPRLLIYKVSNRFSGVPDRFSGSGSGTDFTLKISRVEAEDVGVYYCVQGTQVPYTFGQGTKLEIK

SEQ ID NO: 289 - protein, 112 aa, Artificial
  An artificially generated sequence
DIVMTQSPLSLPVTPGEPASISCRSSQSLVHSNRNTYLHWYQQKPGQAPRLLIYKVSNRFSGVPDRFSGSGSGTDFTLKISRVEAEDVGVYYCYQGTQVPYTFGQGTKLEIK

SEQ ID NO: 290 - protein, 112 aa, Artificial
  An artificially generated sequence
DIVMTQSPLSLPVTPGEPASISCRSSQSLVHSNRNTYLHWYQQKPGQAPRLLIYKVSNRFSGVPDRFSGSGSGTDFTLKISRVEAEDVGVYYCGQSTQVPYTFGQGTKLEIK

SEQ ID NO: 291 - protein, 112 aa, Artificial
  An artificially generated sequence
DIVMTQSPLSLPVTPGEPASISCRSSQSLVHSNRNTYLHWYQQKPGQAPRLLIYKVSNRFSGVPDRFSGSGSGTDFTLKISRVEAEDVGVYYCGQTTQVPYTFGQGTKLEIK

SEQ ID NO: 292 - protein, 112 aa, Artificial
  An artificially generated sequence
DIVMTQSPLSLPVTPGEPASISCRSSQSLVHSNRNTYLHWYQQKPGQAPRLLIYKVSNRFSGVPDRFSGSGSGTDFTLKISRVEAEDVGVYYCGQGTQFPYTFGQGTKLEIK

SEQ ID NO: 293 - protein, 112 aa, Artificial
  An artificially generated sequence
DIVMTQSPLSLPVTPGEPASISCRSSQSLVHSNRNTYLHWYQQKPGQAPRLLIYKVSNRFSGVPDRFSGSGSGTDFTLKISRVEAEDVGVYYCGQGTQHPYTFGQGTKLEIK

SEQ ID NO: 294 - protein, 112 aa, Artificial
  An artificially generated sequence
DIVMTQSPLSLPVTPGEPASISCRSSQSLVHSNRNTYLHWYQQKPGQAPRLLIYKVSNRFSGVPDRFSGSGSGTDFTLKISRVEAEDVGVYYCGQGTQNPYTFGQGTKLEIK

SEQ ID NO: 295 - protein, 112 aa, Artificial
  An artificially generated sequence
DIVMTQSPLSLPVTPGEPASISCRSSQSLVHSNRNTYLHWYQQKPGQAPRLLIYKVSNRFSGVPDRFSGSGSGTDFTLKISRVEAEDVGVYYCGQGTQPPYTFGQGTKLEIK

SEQ ID NO: 296 - protein, 112 aa, Artificial
  An artificially generated sequence
DIVMTQSPLSLPVTPGEPASISCRSSQSLVHSNRNTYLHWYQQKPGQAPRLLIYKVSNRFSGVPDRFSGSGSGTDFTLKISRVEAEDVGVYYCGQGTQWPYTFGQGTKLEIK

SEQ ID NO: 297 - protein, 112 aa, Artificial
  An artificially generated sequence
DIVMTQSPLSLPVTPGEPASISCRSSQSLVHSNRNTYLHWYQQKPGQAPRLLIYKVSNRFSGVPDRFSGSGSGTDFTLKISRVEAEDVGVYYCGQGTQYPYTFGQGTKLEIK

SEQ ID NO: 298 - protein, 112 aa, Artificial
  An artificially generated sequence
DIVMTQSPLSLPVTPGEPASISCRPSQSPVHSNRNTYLHWYQQKPGQAPRLLIYKVSNRFSGVPDRFSGSGSGTDFTLKISRVEAEDVGVYYCGQGTQVPYTFGQGTKLEIK

SEQ ID NO: 299 - protein, 112 aa, Artificial
  An artificially generated sequence
DIVMTQSPLSLPVTPGEPASISCRSSQPPVHSNRNTYLHWYQQKPGQAPRLLIYKVSNRFSGVPDRFSGSGSGTDFTLKISRVEAEDVGVYYCGQGTQVPYTFGQGTKLEIK

SEQ ID NO: 300 - protein, 112 aa, Artificial
  An artificially generated sequence
DIVMTQSPLSLPVTPGEPASISCRSSQSPVHSNRWTYLHWYQQKPGQAPRLLIYKVSNRFSGVPDRFSGSGSGTDFTLKISRVEAEDVGVYYCGQGTQVPYTFGQGTKLEIK

SEQ ID NO: 301 - protein, 112 aa, Artificial
  An artificially generated sequence
DIVMTQSPLSLPVTPGEPASISCRSSQSPVHSNRNTYIHWYQQKPGQAPRLLIYKVSNRFSGVPDRFSGSGSGTDFTLKISRVEAEDVGVYYCGQGTQVPYTFGQGTKLEIK

SEQ ID NO: 302 - protein, 112 aa, Artificial
  An artificially generated sequence
DIVMTQSPLSLPVTPGEPASISCRSSQSPVHSNRNTYLHWYQQKPGQAPRLLIYKVSNRFRGVPDRFSGSGSGTDFTLKISRVEAEDVGVYYCGQGTQVPYTFGQGTKLEIK

SEQ ID NO: 303 - protein, 112 aa, Artificial
  An artificially generated sequence
DIVMTQSPLSLPVTPGEPASISCRSSQSPVHSNRNTYLHWYQQKPGQAPRLLIYKVSNRFWGVPDRFSGSGSGTDFTLKISRVEAEDVGVYYCGQGTQVPYTFGQGTKLEIK

SEQ ID NO: 304 - protein, 112 aa, Artificial
  An artificially generated sequence
DIVMTQSPLSLPVTPGEPASISCRSSQSPVHSNRNTYLHWYQQKPGQAPRLLIYKVSNRFSGVPDRFSGSGSGTDFTLKISRVEAEDVGVYYCYQGTQVPYTFGQGTKLEIK

SEQ ID NO: 305 - protein, 112 aa, Artificial
  An artificially generated sequence
DIVMTQSPLSLPVTPGEPASISCRSSQSPVHSNRNTYLHWYQQKPGQAPRLLIYKVSNRFRGVPDRFSGSGSGTDFTLKISRVEAEDVGVYYCYQGTQVPYTFGQGTKLEIK

SEQ ID NO: 306 - protein, 112 aa, Artificial
  An artificially generated sequence
DIVMTQSPLSLPVTPGEPASISCRSSQSPVHSNRNTYLHWYQQKPGQAPRLLIYKVSNRFWGVPDRFSGSGSGTDFTLKISRVEAEDVGVYYCYQGTQVPYTFGQGTKLEIK

SEQ ID NO: 307 - protein, 112 aa, Artificial
  An artificially generated sequence
DIVMTQSPLSLPVTPGEPASISCRSSQSPVHSNRNTYIHWYQQKPGQAPRLLIYKVSNRFSGVPDRFSGSGSGTDFTLKISRVEAEDVGVYYCYQGTQVPYTFGQGTKLEIK

SEQ ID NO: 308 - protein, 112 aa, Artificial
  An artificially generated sequence
DIVMTQSPLSLPVTPGEPASISCRSSQSPVHSNRWTYLHWYQQKPGQAPRLLIYKVSNRFSGVPDRFSGSGSGTDFTLKISRVEAEDVGVYYCYQGTQVPYTFGQGTKLEIK

SEQ ID NO: 309 - protein, 112 aa, Artificial
  An artificially generated sequence
DIVMTQSPLSLPVTPGEPASISCRSSQPPVHSNRNTYLHWYQQKPGQAPRLLIYKVSNRFSGVPDRFSGSGSGTDFTLKISRVEAEDVGVYYCYQGTQVPYTFGQGTKLEIK

SEQ ID NO: 310 - protein, 112 aa, Artificial
  An artificially generated sequence
DIVMTQSPLSLPVTPGEPASISCRPSQSPVHSNRNTYLHWYQQKPGQAPRLLIYKVSNRFSGVPDRFSGSGSGTDFTLKISRVEAEDVGVYYCYQGTQVPYTFGQGTKLEIK

SEQ ID NO: 311 - protein, 112 aa, Artificial
  An artificially generated sequence
DIVMTQSPLSLPVTPGEPASISCRSSQSPVHSNRNTYIHWYQQKPGQAPRLLIYKVSNRFRGVPDRFSGSGSGTDFTLKISRVEAEDVGVYYCGQGTQVPYTFGQGTKLEIK

SEQ ID NO: 312 - protein, 112 aa, Artificial
  An artificially generated sequence
DIVMTQSPLSLPVTPGEPASISCRSSQPPVHSNRNTYLHWYQQKPGQAPRLLIYKVSNRFRGVPDRFSGSGSGTDFTLKISRVEAEDVGVYYCGQGTQVPYTFGQGTKLEIK

SEQ ID NO: 313 - protein, 112 aa, Artificial
  An artificially generated sequence
DIVMTQSPLSLPVTPGEPASISCRSSQPPVHSNRNTYIHWYQQKPGQAPRLLIYKVSNRFSGVPDRFSGSGSGTDFTLKISRVEAEDVGVYYCGQGTQVPYTFGQGTKLEIK

SEQ ID NO: 314 - protein, 112 aa, Artificial
  An artificially generated sequence
DIVMTQSPLSLPVTPGEPASISCRSSQPLVHSNRNTYLHWYQQKPGQAPRLLIYKVSNRFRGVPDRFSGSGSGTDFTLKISRVEAEDVGVYYCGQGTQVPYTFGQGTKLEIK

SEQ ID NO: 315 - protein, 112 aa, Artificial
  An artificially generated sequence
DIVMTQSPLSLPVTPGEPASISCRPSQSLVHSNRNTYLHWYQQKPGQAPRLLIYKVSNRFRGVPDRFSGSGSGTDFTLKISRVEAEDVGVYYCGQGTQVPYTFGQGTKLEIK

SEQ ID NO: 316 - protein, 112 aa, Artificial
  An artificially generated sequence
DIVMTQSPLSLPVTPGEPASISCRSSQSLVHSNRNTYLHWYQQKPGQAPRLLIYKVSNRFRGVPDRFSGSGSGTDFTLKISRVEAEDVGVYYCYQGTQVPYTFGQGTKLEIK

SEQ ID NO: 317 - protein, 112 aa, Artificial
  An artificially generated sequence
DIVMTQSPLSLPVTPGEPASISCRSSQSLVHSNRNTYIHWYQQKPGQAPRLLIYKVSNRFRGVPDRFSGSGSGTDFTLKISRVEAEDVGVYYCGQGTQVPYTFGQGTKLEIK

SEQ ID NO: 318 - protein, 112 aa, Artificial
  An artificially generated sequence
DIVMTQSPLSLPVTPGEPASISCRSSQPLVHSNRNTYLHWYQQKPGQAPRLLIYKVSNRFRGVPDRFSGSGSGTDFTLKISRVEAEDVGVYYCYQGTQVPYTFGQGTKLEIK

SEQ ID NO: 319 - protein, 112 aa, Artificial
  An artificially generated sequence
DIVMTQSPLSLPVTPGEPASISCRSSQSPVHSNRNTYIQWYQQKPGQAPRLLIYKVSNRFSGVPDRFSGSGSGTDFTLKISRVEAEDVGVYYCYQGTQVPYTFGQGTKLEIK

SEQ ID NO: 320 - protein, 112 aa, Artificial
  An artificially generated sequence
DIVMTQSPLSLPVTPGEPASISCRSSQSPVHSNRNTYIHWYQQKPGQAPRLLIYKVSNRLSGVPDRFSGSGSGTDFTLKISRVEAEDVGVYYCYQGTQVPYTFGQGTKLEIK

SEQ ID NO: 321 - protein, 112 aa, Artificial
  An artificially generated sequence
DIVMTQSPLSLPVTPGEPASISCRSSQSPVHSNRNTYIHWYQQKPGQAPRLLIYKVSNRFPGVPDRFSGSGSGTDFTLKISRVEAEDVGVYYCYQGTQVPYTFGQGTKLEIK

SEQ ID NO: 322 - protein, 112 aa, Artificial
  An artificially generated sequence
DIVMTQSPLSLPVTPGEPASISCRSSQSPVHSNRNTYIHWYQQKPGQAPRLLIYKVSNRFSGVPDRFSGSGSGTDFTLKISRVEAEDVGVYYCIQGTQVPYTFGQGTKLEIK

SEQ ID NO: 323 - protein, 112 aa, Artificial
  An artificially generated sequence
DIVMTQSPLSLPVTPGEPASISCRSSQSPVHSNRNTYIHWYQQKPGQAPRLLIYKVSNRFSGVPDRFSGSGSGTDFTLKISRVEAEDVGVYYCLQGTQVPYTFGQGTKLEIK

SEQ ID NO: 324 - protein, 112 aa, Artificial
  An artificially generated sequence
DIVMTQSPLSLPVTPGEPASISCRSSQSPVHSNRNTYIHWYQQKPGQAPRLLIYKVSNRFSGVPDRFSGSGSGTDFTLKISRVEAEDVGVYYCVQGTQVPYTFGQGTKLEIK

SEQ ID NO: 325 - protein, 112 aa, Artificial
  An artificially generated sequence
DIVMTQSPLSLPVTPGEPASISCRSSQSPVHSNRNTYIHWYQQKPGQAPRLLIYKVSNRFSGVPDRFSGSGSGTDFTLKISRVEAEDVGVYYCYQSTQVPYTFGQGTKLEIK

SEQ ID NO: 326 - protein, 112 aa, Artificial
  An artificially generated sequence
DIVMTQSPLSLPVTPGEPASISCRSSQSPVHSNRNTYIHWYQQKPGQAPRLLIYKVSNRFSGVPDRFSGSGSGTDFTLKISRVEAEDVGVYYCYQTTQVPYTFGQGTKLEIK

SEQ ID NO: 327 - protein, 112 aa, Artificial
  An artificially generated sequence
DIVMTQSPLSLPVTPGEPASISCRSSQSPVHSNRNTYIHWYQQKPGQAPRLLIYKVSNRFSGVPDRFSGSGSGTDFTLKISRVEAEDVGVYYCYQGTQWPYTFGQGTKLEIK

SEQ ID NO: 328 - protein, 112 aa, Artificial
  An artificially generated sequence
DIVMTQSPLSLPVTPGEPASISCRSSESLVHSNRNTYLHWYQQKPGQAPRLLIYKVSNRFSGVPDRFSGSGSGTDFTLKISRVEAEDVGVYYCGQGTQVPYTFGQGTKLEIK

SEQ ID NO: 329 - protein, 112 aa, Artificial
  An artificially generated sequence
DIVMTQSPLSLPVTPGEPASISCRSSQELVHSNRNTYLHWYQQKPGQAPRLLIYKVSNRFSGVPDRFSGSGSGTDFTLKISRVEAEDVGVYYCGQGTQVPYTFGQGTKLEIK

SEQ ID NO: 330 - protein, 112 aa, Artificial
  An artificially generated sequence
DIVMTQSPLSLPVTPGEPASISCRSSQEPVHSNRNTYLHWYQQKPGQAPRLLIYKVSNRFRGVPDRFSGSGSGTDFTLKISRVEAEDVGVYYCGQGTQVPYTFGQGTKLEIK

SEQ ID NO: 331 - protein, 112 aa, Artificial
  An artificially generated sequence
DIVMTQSPLSLPVTPGEPASISCRSSQEPVHSNRNTYLHWYQQKPGQAPRLLIYKVSNRFSGVPDRFSGSGSGTDFTLKISRVEAEDVGVYYCYQGTQVPYTFGQGTKLEIK

SEQ ID NO: 332 - protein, 112 aa, Artificial
  An artificially generated sequence
DIVMTQSPLSLPVTPGEPASISCRSSQEPVHSNRNTYLHWYQQKPGQAPRLLIYKVSNRFWGVPDRFSGSGSGTDFTLKISRVEAEDVGVYYCYQGTQVPYTFGQGTKLEIK

SEQ ID NO: 333 - protein, 112 aa, Artificial
  An artificially generated sequence
DIVMTQSPLSLPVTPGEPASISCRSSQEPVHSNRNTYIHWYQQKPGQAPRLLIYKVSNRFSGVPDRFSGSGSGTDFTLKISRVEAEDVGVYYCYQGTQVPYTFGQGTKLEIK

SEQ ID NO: 334 - protein, 112 aa, Artificial
  An artificially generated sequence
DIVMTQSPLSLPVTPGEPASISCRSSEPPVHSNRNTYLHWYQQKPGQAPRLLIYKVSNRFSGVPDRFSGSGSGTDFTLKISRVEAEDVGVYYCYQGTQVPYTFGQGTKLEIK

SEQ ID NO: 335 - protein, 112 aa, Artificial
  An artificially generated sequence
DIVMTQSPLSLPVTPGEPASISCRSSESPVHSNRNTYLHWYQQKPGQAPRLLIYKVSNRFRGVPDRFSGSGSGTDFTLKISRVEAEDVGVYYCGQGTQVPYTFGQGTKLEIK

SEQ ID NO: 336 - protein, 112 aa, Artificial
  An artificially generated sequence
DIVMTQSPLSLPVTPGEPASISCRSSESPVHSNRNTYLHWYQQKPGQAPRLLIYKVSNRFSGVPDRFSGSGSGTDFTLKISRVEAEDVGVYYCYQGTQVPYTFGQGTKLEIK

SEQ ID NO: 337 - protein, 112 aa, Artificial
  An artificially generated sequence
DIVMTQSPLSLPVTPGEPASISCRSSESPVHSNRNTYLHWYQQKPGQAPRLLIYKVSNRFWGVPDRFSGSGSGTDFTLKISRVEAEDVGVYYCYQGTQVPYTFGQGTKLEIK

SEQ ID NO: 338 - protein, 112 aa, Artificial
  An artificially generated sequence
DIVMTQSPLSLPVTPGEPASISCRSSESPVHSNRNTYIHWYQQKPGQAPRLLIYKVSNRFSGVPDRFSGSGSGTDFTLKISRVEAEDVGVYYCYQGTQVPYTFGQGTKLEIK

SEQ ID NO: 339 - protein, 112 aa, Artificial
  An artificially generated sequence
DIVMTQSPLSLPVTPGEPASISCRSSEPPVHSNRNTYLHWYQQKPGQAPRLLIYKVSNRFRGVPDRFSGSGSGTDFTLKISRVEAEDVGVYYCGQGTQVPYTFGQGTKLEIK

SEQ ID NO: 340 - protein, 112 aa, Artificial
  An artificially generated sequence
DIVMTQSPLSLPVTPGEPASISCRSSQSPVHSNRNTYIQWYQQKPGQAPRLLIYKVSNRFSGVPDRFSGSGSGTDFTLKISRVEAEDVGVYYCSQGTQVPYTFGQGTKLEIK

SEQ ID NO: 341 - protein, 112 aa, Artificial
  An artificially generated sequence
DIVMTQSPLSLPVTPGEPASISCRSSQSPVHSNRNTYIQWYQQKPGQAPRLLIYKVSNRFSGVPDRFSGSGSGTDFTLKISRVEAEDVGVYYCIQGTQVPYTFGQGTKLEIK

SEQ ID NO: 342 - protein, 112 aa, Artificial
  An artificially generated sequence
DIVMTQSPLSLPVTPGEPASISCRPSQSPVHSNRNTYIQWYQQKPGQAPRLLIYKVSNRFSGVPDRFSGSGSGTDFTLKISRVEAEDVGVYYCYQGTQVPYTFGQGTKLEIK

SEQ ID NO: 343 - protein, 112 aa, Artificial
  An artificially generated sequence
DIVMTQSPLSLPVTPGEPASISCRPSQSPVHSNRNTYIQWYQQKPGQAPRLLIYKVSNRFSGVPDRFSGSGSGTDFTLKISRVEAEDVGVYYCSQGTQVPYTFGQGTKLEIK

SEQ ID NO: 344 - protein, 112 aa, Artificial
  An artificially generated sequence
DIVMTQSPLSLPVTPGEPASISCRPSQSPVHSNRNTYIQWYQQKPGQAPRLLIYKVSNRFSGVPDRFSGSGSGTDFTLKISRVEAEDVGVYYCIQGTQVPYTFGQGTKLEIK

SEQ ID NO: 345 - protein, 112 aa, Artificial
  An artificially generated sequence
DIVMTQSPLSLPVTPGEPASISCRSSQPPVHSNRNTYLHWYQQKPGQAPRLLIYKVSNRFSGVPDRFSGSGSGTDFTLKISRVEAEDVGVYYCTQGTQVPYTFGQGTKLEIK

SEQ ID NO: 346 - protein, 112 aa, Artificial
  An artificially generated sequence
DIVMTQSPLSLPVTPGEPASISCRSSQSPVHSNRNTYIHWYQQKPGQAPRLLIYKVSNRFSGVPDRFSGSGSGTDFTLKISRVEAEDVGVYYCTQGTQVPYTFGQGTKLEIK

SEQ ID NO: 347 - protein, 112 aa, Artificial
  An artificially generated sequence
DIVMTQSPLSLPVTPGEPASISCRPSQSPVHSNRNTYLHWYQQKPGQAPRLLIYKVSNRFSGVPDRFSGSGSGTDFTLKISRVEAEDVGVYYCTQGTQVPYTFGQGTKLEIK

SEQ ID NO: 348 - protein, 112 aa, Artificial
  An artificially generated sequence
DIVMTQSPLSLPVTPGEPASISCRSSQSPVHSNRNTYIQWYQQKPGQAPRLLIYKVSNRFSGVPDRFSGSGSGTDFTLKISRVEAEDVGVYYCTQGTQVPYTFGQGTKLEIK

SEQ ID NO: 349 - protein, 112 aa, Artificial
  An artificially generated sequence
DIVMTQSPLSLPVTPGEPASISCRSSQPPVHSNRNTYLHWYQQKPGQAPRLLIYKVSNRFSGVPDRFSGSGSGTDFTLKISRVEAEDVGVYYCAQGTQVPYTFGQGTKLEIK

SEQ ID NO: 350 - protein, 112 aa, Artificial
  An artificially generated sequence
DIVMTQSPLSLPVTPGEPASISCRSSQSPVHSNRNTYIHWYQQKPGQAPRLLIYKVSNRFSGVPDRFSGSGSGTDFTLKISRVEAEDVGVYYCAQGTQVPYTFGQGTKLEIK

SEQ ID NO: 351 - protein, 112 aa, Artificial
  An artificially generated sequence
DIVMTQSPLSLPVTPGEPASISCRPSQSPVHSNRNTYLHWYQQKPGQAPRLLIYKVSNRFSGVPDRFSGSGSGTDFTLKISRVEAEDVGVYYCAQGTQVPYTFGQGTKLEIK

SEQ ID NO: 352 - protein, 112 aa, Artificial
  An artificially generated sequence
DIVMTQSPLSLPVTPGEPASISCRSSQSPVHSNRNTYIQWYQQKPGQAPRLLIYKVSNRFSGVPDRFSGSGSGTDFTLKISRVEAEDVGVYYCAQGTQVPYTFGQGTKLEIK

SEQ ID NO: 353 - protein, 112 aa, Artificial
  An artificially generated sequence
DIVMTQSPLSLPVTPGEPASISCRSSQPPVHSNRNTYLHWYQQKPGQAPRLLIYKVSNRFSGVPDRFSGSGSGTDFTLKISRVEAEDVGVYYCVQGTQVPYTFGQGTKLEIK

SEQ ID NO: 354 - protein, 112 aa, Artificial
  An artificially generated sequence
DIVMTQSPLSLPVTPGEPASISCRPSQSPVHSNRNTYLHWYQQKPGQAPRLLIYKVSNRFSGVPDRFSGSGSGTDFTLKISRVEAEDVGVYYCVQGTQVPYTFGQGTKLEIK

SEQ ID NO: 355 - protein, 112 aa, Artificial
  An artificially generated sequence
DIVMTQSPLSLPVTPGEPASISCRSSQSPVHSNRNTYIQWYQQKPGQAPRLLIYKVSNRFSGVPDRFSGSGSGTDFTLKISRVEAEDVGVYYCVQGTQVPYTFGQGTKLEIK

SEQ ID NO: 356 - protein, 112 aa, Artificial
  An artificially generated sequence
DIVMTQSPLSLPVTPGEPASISCRSSQSPVHSNRNTYIQWYQQKPGQAPRLLIYKVSNRFSGVPDRFSGSGSGTDFTLKISRVEAEDVGVYYCGQGTQVPYTFGQGTKLEIK

SEQ ID NO: 357 - protein, 112 aa, Artificial
  An artificially generated sequence
DIVMTQSPLSLPVTPGEPASISCRSSQSLVHSNRQTYLHWYQQKPGQAPRLLIYKVSNRFSGVPDRFSGSGSGTDFTLKISRVEAEDVGVYYCGQGTQVPYTFGQGTKLEIK

SEQ ID NO: 358 - protein, 112 aa, Artificial
  An artificially generated sequence
DIVMTQSPLSLPVTPGEPASISCRSSQPPVHSNRQTYLHWYQQKPGQAPRLLIYKVSNRFSGVPDRFSGSGSGTDFTLKISRVEAEDVGVYYCGQGTQVPYTFGQGTKLEIK

SEQ ID NO: 359 - protein, 112 aa, Artificial
  An artificially generated sequence
DIVMTQSPLSLPVTPGEPASISCRSSQPLVHSNRQTYLHWYQQKPGQAPRLLIYKVSNRFSGVPDRFSGSGSGTDFTLKISRVEAEDVGVYYCGQGTQVPYTFGQGTKLEIK

SEQ ID NO: 360 - protein, 112 aa, Artificial
  An artificially generated sequence
DIVMTQSPLSLPVTPGEPASISCQASESLVHSNRNTYLHWYQQKPGQAPRLLIYKVSNRFSGVPDRFSGSGSGTDFTLKISRVEAEDVGVYYCGQGTQVPYTFGQGTKLEIK

SEQ ID NO: 361 - protein, 112 aa, Artificial
  An artificially generated sequence
DIVMTQSPLSLPVTPGEPASISCRSSQSLVHSNRNTYLHWYLQKPGQSPQLLIYKVSNRFSGVPDRFSGSGSGTDFTLKISRVEAEDVGVYYCGQGTQVPYTFGQGTKLEIK

SEQ ID NO: 362 - protein, 112 aa, Artificial
  An artificially generated sequence
DIVMTQSPLSLPVTPGEPASISCRSSQSLVHSNRNTYLHWYQQKPGQAPRLLIYKVSNRFSGVPDRFSGSGSGTDFTLKISRVEAEDVGVYYCGQGTQVPYTFGQGTKVEIE

SEQ ID NO: 363 - protein, 112 aa, Artificial
  An artificially generated sequence
DIVMTQSPLSLPVTPGEPASISCQASESLVHSNRNTYLHWYQQKPGQAPRLLIYKVSNRFSGVPDRFSGSGSGTDFTLKISRVEAEDVGVYYCGQGTQVPYTFGQGTKVEIE

SEQ ID NO: 364 - protein, 112 aa, Artificial
  An artificially generated sequence
DIVMTQSPLSLPVTPGEPASISCRSSQSLVHSNRNTYLHWYLQKPGQSPQLLIYKVSNRFSGVPDRFSGSGSGTDFTLKISRVEAEDVGVYYCGQGTQVPYTFGQGTKVEIE

SEQ ID NO: 365 - protein, 112 aa, Artificial
  An artificially generated sequence
DIVMTQSPLSLPVTPGEPASISCQASESLVHSNRNTYLHWYLQKPGQSPQLLIYKVSNRFSGVPDRFSGSGSGTDFTLKISRVEAEDVGVYYCGQGTQVPYTFGQGTKVEIE

SEQ ID NO: 366 - protein, 112 aa, Artificial
  An artificially generated sequence
DIVMTQSPLSLPVTPGEPASISCQASESLVHSNRNTYLHWYLQKPGQSPQLLIYKVSNRFSGVPDRFSGSGSGTDFTLKISRVEAEDVGVYYCGQGTQVPYTFGQGTKLEIK

SEQ ID NO: 367 - protein, 112 aa, Artificial
  An artificially generated sequence
DIVMTQSPLSLPVTPGEPASISCQASESLVHSNRNTYLHWYQQKPGQAPRLLIYKVSNRFRGVPDRFSGSGSGTDFTLKISRVEAEDVGVYYCGQGTQVPYTFGQGTKLEIK

SEQ ID NO: 368 - protein, 112 aa, Artificial
  An artificially generated sequence
DIVMTQSPLSLPVTPGEPASISCRSSQSLVHSNRNTYLHWYLQKPGQSPQLLIYKVSNRFRGVPDRFSGSGSGTDFTLKISRVEAEDVGVYYCGQGTQVPYTFGQGTKLEIK

SEQ ID NO: 369 - protein, 112 aa, Artificial
  An artificially generated sequence
DIVMTQSPLSLPVTPGEPASISCRSSQSLVHSNRNTYLHWYQQKPGQAPRLLIYKVSNRFRGVPDRFSGSGSGTDFTLKISRVEAEDVGVYYCGQGTQVPYTFGQGTKVEIE

SEQ ID NO: 370 - protein, 112 aa, Artificial
  An artificially generated sequence
DIVMTQSPLSLPVTPGEPASISCQASESLVHSNRNTYLHWYQQKPGQAPRLLIYKVSNRFRGVPDRFSGSGSGTDFTLKISRVEAEDVGVYYCGQGTQVPYTFGQGTKVEIE

SEQ ID NO: 371 - protein, 112 aa, Artificial
  An artificially generated sequence
DIVMTQSPLSLPVTPGEPASISCRSSQSLVHSNRNTYLHWYLQKPGQSPQLLIYKVSNRFRGVPDRFSGSGSGTDFTLKISRVEAEDVGVYYCGQGTQVPYTFGQGTKVEIE

SEQ ID NO: 372 - protein, 112 aa, Artificial
  An artificially generated sequence
DIVMTQSPLSLPVTPGEPASISCQASESLVHSNRNTYLHWYLQKPGQSPQLLIYKVSNRFRGVPDRFSGSGSGTDFTLKISRVEAEDVGVYYCGQGTQVPYTFGQGTKVEIE

SEQ ID NO: 373 - protein, 112 aa, Artificial
  An artificially generated sequence
DIVMTQSPLSLPVTPGEPASISCRSSQSPVHSNRNTYLHWYLQKPGQSPQLLIYKVSNRFSGVPDRFSGSGSGTDFTLKISRVEAEDVGVYYCGQGTQVPYTFGQGTKLEIK

SEQ ID NO: 374 - protein, 112 aa, Artificial
  An artificially generated sequence
DIVMTQSPLSLPVTPGEPASISCRSSQSPVHSNRNTYLHWYLQKPGQSPQLLIYKVSNRFSGVPDRFSGSGSGTDFTLKISRVEAEDVGVYYCYQGTQVPYTFGQGTKLEIK

SEQ ID NO: 375 - protein, 112 aa, Artificial
  An artificially generated sequence
DIVMTQSPLSLPVTPGEPASISCRSSQSPVHSNRNTYIQWYLQKPGQSPQLLIYKVSNRFSGVPDRFSGSGSGTDFTLKISRVEAEDVGVYYCYQGTQVPYTFGQGTKLEIK

SEQ ID NO: 376 - protein, 112 aa, Artificial
  An artificially generated sequence
DIVMTQSPLSLPVTPGEPASISCQASESPVHSNRNTYLHWYLQKPGQSPQLLIYKVSNRFSGVPDRFSGSGSGTDFTLKISRVEAEDVGVYYCGQGTQVPYTFGQGTKLEIK

SEQ ID NO: 377 - protein, 112 aa, Artificial
  An artificially generated sequence
DIVMTQSPLSLPVTPGEPASISCQASESPVHSNRNTYLHWYLQKPGQSPQLLIYKVSNRFSGVPDRFSGSGSGTDFTLKISRVEAEDVGVYYCYQGTQVPYTFGQGTKLEIK

SEQ ID NO: 378 - protein, 112 aa, Artificial
  An artificially generated sequence
DIVMTQSPLSLPVTPGEPASISCQASESPVHSNRNTYIQWYLQKPGQSPQLLIYKVSNRFSGVPDRFSGSGSGTDFTLKISRVEAEDVGVYYCYQGTQVPYTFGQGTKLEIK

SEQ ID NO: 379 - protein, 112 aa, Artificial
  An artificially generated sequence
DIVMTQSPLSLPVTPGEPASISCRSSQSPVHSNRNTYLHWYLQKPGQSPQLLIYKVSNRFSGVPDRFSGSGSGTDFTLKISRVEAEDVGVYYCTQGTQVPYTFGQGTKLEIK

SEQ ID NO: 380 - protein, 112 aa, Artificial
  An artificially generated sequence
DIVMTQSPLSLPVTPGEPASISCQASESPVHSNRNTYLHWYLQKPGQSPQLLIYKVSNRFSGVPDRFSGSGSGTDFTLKISRVEAEDVGVYYCTQGTQVPYTFGQGTKLEIK

SEQ ID NO: 381 - protein, 458 aa, Artificial
  An artificially generated sequence
QVQLVESGGGVVQPGRSLRLSCAASGFTFSNAWMHWVRQAPGKGLEWVANIKAKSNNYATYYAESVKGRFTISRDDSKNSLYLQMNSLKTEDTAVYYCRYVHYGAYYGVDAWGQGTTVTVSSASTKGPSVFPLAPSSKSTSGGTAALGCLVKDYFPEPVTVSWNSGALTSGVHTFPAVLQSSGLYSLSSVVTVPSSSLGTQTYICNVNHKPSNTKVDKKVEPKSCDKTHTCPPCPAPEAAGGPSVFLFPPKPKDTLMISRTPEVTCVVVDVSHEDPEVKFNWYVDGVEVHNAKTKPREEQYASTYRVVSVLTVLHQDWLNGKEYKCKVSNKALPAPIEKTISKAKGQPREPQVYTLPPSRCELTKNQVSLSCAVKGFYPSDIAVEWESNGQPENNYKTTPPVLDSDGSFFLVSKLTVDKSRWQQGNVFSCSVMHEALHNHYTQKSLSLSPDYKDDDDK

SEQ ID NO: 382 - protein, 458 aa, Artificial
  An artificially generated sequence
QVQLVESGGGVVQPGRSLRLSCAASGFTFSNAWMHWVRQAPGKGLEWVAQIKAKSNNYATYYAESVKGRFTISRDDSKNSLYLQMNSLKTEDTAVYYCRYVHYYAYYGVQAWGQGTTVTVSSASTKGPSVFPLAPSSKSTSGGTAALGCLVKDYFPEPVTVSWNSGALTSGVHTFPAVLQSSGLYSLSSVVTVPSSSLGTQTYICNVNHKPSNTKVDKKVEPKSCDKTHTCPPCPAPEAAGGPSVFLFPPKPKDTLMISRTPEVTCVVVDVSHEDPEVKFNWYVDGVEVHNAKTKPREEQYASTYRVVSVLTVLHQDWLNGKEYKCKVSNKALPAPIEKTISKAKGQPREPQVYTLPPSRCELTKNQVSLSCAVKGFYPSDIAVEWESNGQPENNYKTTPPVLDSDGSFFLVSKLTVDKSRWQQGNVFSCSVMHEALHNHYTQKSLSLSPDYKDDDDK

SEQ ID NO: 383 - protein, 458 aa, Artificial
  An artificially generated sequence
QVQLVESGGGVVQPGRSLRLSCAASGFTFSNAWMHWVRQAPGKGLEWVAQIKAKSNNYATYYAESVKGRFTISRDDSKNSLYLQMNSLKTEDTAVYYCRYVHYYYYYGVDAWGQGTTVTVSSASTKGPSVFPLAPSSKSTSGGTAALGCLVKDYFPEPVTVSWNSGALTSGVHTFPAVLQSSGLYSLSSVVTVPSSSLGTQTYICNVNHKPSNTKVDKKVEPKSCDKTHTCPPCPAPEAAGGPSVFLFPPKPKDTLMISRTPEVTCVVVDVSHEDPEVKFNWYVDGVEVHNAKTKPREEQYASTYRVVSVLTVLHQDWLNGKEYKCKVSNKALPAPIEKTISKAKGQPREPQVYTLPPSRCELTKNQVSLSCAVKGFYPSDIAVEWESNGQPENNYKTTPPVLDSDGSFFLVSKLTVDKSRWQQGNVFSCSVMHEALHNHYTQKSLSLSPDYKDDDDK

SEQ ID NO: 384 - protein, 440 aa, Artificial
  An artificially generated sequence
QVQLVQSGAEVKKPGASVTVSCKASGYTFTDYEMHWIRQPPGEGLEWIGAIDGETPDTAYSEKFKGRVTLTADKSTSTAYMELSSLTSEDTAVYYCTRFYSYTYWGQGTLVTVSSASTKGPSVFPLAPCSRSTSESTAALGCLVKDYFPEPVTVSWNSGALTSGVHTFPAVLQSSGLYSLSSVVTVPSSSLGTQTYTCNVDHKPSNTKVDKRVESKYGPPCPPCPAPEFRGGPKVFLFPPKPKDTLMISRTPEVTCVVVDVSQEDPEVQFNWYVDGVEVHNAKTKPREEQFASTYRVVSVLTVLHQDWLNGKEYKCKVSNKGLPSSIEKTISKAKGQPREPQVYTLPPSQEEMTKNQVSLTCLVKGFYPSDIAVEWESNGQPENNYKTTPPVLDSDGSFFLYSKLTVDKSRWQEGNVFSCSVMHEALHNHYTQESLSLSP

SEQ ID NO: 385 - protein, 440 aa, Artificial
  An artificially generated sequence
QVQLVQSGAEVKKPGASVTVSCKASGYTFTDYEMHWIRQPPGEGLEWIGAIDGPTPDTAYSEKFKGRVTLTADKSTSTAYMELSSLTSEDTAVYYCTRFYSYTYWGQGTLVTVSSASTKGPSVFPLAPCSRSTSESTAALGCLVKDYFPEPVTVSWNSGALTSGVHTFPAVLQSSGLYSLSSVVTVPSSSLGTQTYTCNVDHKPSNTKVDKRVESKYGPPCPPCPAPEFRGGPKVFLFPPKPKDTLMISRTPEVTCVVVDVSQEDPEVQFNWYVDGVEVHNAKTKPREEQFASTYRVVSVLTVLHQDWLNGKEYKCKVSNKGLPSSIEKTISKAKGQPREPQVYTLPPSQEEMTKNQVSLTCLVKGFYPSDIAVEWESNGQPENNYKTTPPVLDSDGSFFLYSKLTVDKSRWQEGNVFSCSVMHEALHNHYTQESLSLSP

SEQ ID NO: 386 - protein, 440 aa, Artificial
  An artificially generated sequence
QVQLVQSGAEVKKPGASVTVSCKASGYTFTDYEMHWVRQAPGEGLEWMGAIDGETPDTAYSEKFKGRVTLTADKSTSTAYMELSSLTSEDTAVYYCTRFYSYTYWGQGTLVTVSSASTKGPSVFPLAPCSRSTSESTAALGCLVKDYFPEPVTVSWNSGALTSGVHTFPAVLQSSGLYSLSSVVTVPSSSLGTQTYTCNVDHKPSNTKVDKRVESKYGPPCPPCPAPEFRGGPKVFLFPPKPKDTLMISRTPEVTCVVVDVSQEDPEVQFNWYVDGVEVHNAKTKPREEQFASTYRVVSVLTVLHQDWLNGKEYKCKVSNKGLPSSIEKTISKAKGQPREPQVYTLPPSQEEMTKNQVSLTCLVKGFYPSDIAVEWESNGQPENNYKTTPPVLDSDGSFFLYSKLTVDKSRWQEGNVFSCSVMHEALHNHYTQESLSLSP

SEQ ID NO: 387 - protein, 440 aa, Artificial
  An artificially generated sequence
QVQLVQSGAEVKKPGASVKVSCKASGYTFTDYEMHWIRQPPGQGLEWIGAIDGKTPDTAYSQKFKGRVTLTADKSTSTAYMELSSLTSEDTAVYYCTRFYSYTYWGQGTLVTVSSASTKGPSVFPLAPCSRSTSESTAALGCLVKDYFPEPVTVSWNSGALTSGVHTFPAVLQSSGLYSLSSVVTVPSSSLGTQTYTCNVDHKPSNTKVDKRVESKYGPPCPPCPAPEFRGGPKVFLFPPKPKDTLMISRTPEVTCVVVDVSQEDPEVQFNWYVDGVEVHNAKTKPREEQFASTYRVVSVLTVLHQDWLNGKEYKCKVSNKGLPSSIEKTISKAKGQPREPQVYTLPPSQEEMTKNQVSLTCLVKGFYPSDIAVEWESNGQPENNYKTTPPVLDSDGSFFLYSKLTVDKSRWQEGNVFSCSVMHEALHNHYTQESLSLSP

SEQ ID NO: 388 - protein, 458 aa, Artificial
  An artificially generated sequence
QVQLVESGGGVVQPGRSLRLSCAASGFTFSNAWMHWVRQAPGKGLEWVAQIKAKSNNYATYYAESVKGRFTISRDDSKNSLYLQMNSLKTEDTAVYYCRYVHYGAYYGVDAWGQGTTVTVSSASTKGPSVFPLAPSSKSTSGGTAALGCLVKDYFPEPVTVSWNSGALTSGVHTFPAVLQSSGLYSLSSVVTVPSSSLGTQTYICNVNHKPSNTKVDKKVEPKSCDKTHTCPPCPAPEAAGGPSVFLFPPKPKDTLMISRTPEVTCVVVDVSHEDPEVKFNWYVDGVEVHNAKTKPREEQYASTYRVVSVLTVLHQDWLNGKEYKCKVSNKALPAPIEKTISKAKGQPREPQVYTLPPSRCELTKNQVSLSCAVKGFYPSDIAVEWESNGQPENNYKTTPPVLDSDGSFFLVSKLTVDKSRWQQGNVFSCSVMHEALHNHYTQKSLSLSPDYKDDDDK

SEQ ID NO: 389 - protein, 458 aa, Artificial; identical to SEQ ID NO: 49
  An artificially generated sequence

SEQ ID NO: 390 - protein, 447 aa, Artificial
  An artificially generated sequence
EVQLVETGGSLVQPGKSLKLTCATSGFTFSNAWMHWVRQSPEKQLEWVAQIKAKSNNYATYYAESVKGRFTISRDDSKSNIYLQMNSLKEEDTAVYYCRYVHYGAYYGVDAWGQGTSVTVSSASTKGPSVFPLAPCSRSTSESTAALGCLVKDYFPEPVTVSWNSGALTSGVHTFPAVLQSSGLYSLSSVVTVPSSSLGTKTYTCNVDHKPSNTKVDKRVESKYGPPCPPCPAPEFRGGPKVFLFPPKPKDTLMISRTPEVTCVVVDVSQEDPEVQFNWYVDGVEVHNAKTKPREEQFASTYRVVSVLTVLHQDWLNGKEYKCKVSNKGLPSSIEKTISKAKGQPREPQVYTLPPSQKEMTKNQVSLTCLVKGFYPSDIAVEWESNGQPENNYKTTPPVLDSDGSFFLYSKLTVDKSRWQEGNVFSCSVMHEALHNRYTQKSLSLSP

SEQ ID NO: 391 - protein, 458 aa, Artificial
  An artificially generated sequence
QVQLVESGGGVVQPGRSLRLSCAASGFTFSNAWMHWVRQAPGKGLEWVAQIKAKSNNYKKYYAESVKGRFTISRDDSKNSLYLQMNSLKTEDTAVYYCRYVHYYYYYGVQAWGQGTTVTVSSASTKGPSVFPLAPSSKSTSGGTAALGCLVKDYFPEPVTVSWNSGALTSGVHTFPAVLQSSGLYSLSSVVTVPSSSLGTQTYICNVNHKPSNTKVDKKVEPKSCDKTHTCPPCPAPEAAGGPSVFLFPPKPKDTLMISRTPEVTCVVVDVSHEDPEVKFNWYVDGVEVHNAKTKPREEQYASTYRVVSVLTVLHQDWLNGKEYKCKVSNKALPAPIEKTISKAKGQPREPQVYTLPPSRCELTKNQVSLSCAVKGFYPSDIAVEWESNGQPENNYKTTPPVLDSDGSFFLVSKLTVDKSRWQQGNVFSCSVMHEALHNHYTQKSLSLSPDYKDDDDK

SEQ ID NO: 392 - protein, 458 aa, Artificial
  An artificially generated sequence
QVQLVESGGGLVQPGRSLRLSCAASGFTFSNAWMHWVRQAPGKGLEWVAQIKGKSNNYATYYAESVKGRFTISRADSKNSIYLQMNSLKTEDTAVYYCRYVHYSASYGVDIWGQGTTVTVSSASTKGPSVFPLAPSSKSTSGGTAALGCLVKDYFPEPVTVSWNSGALTSGVHTFPAVLQSSGLYSLSSVVTVPSSSLGTQTYICNVNHKPSNTKVDKKVEPKSCDKTHTCPPCPAPEAAGGPSVFLFPPKPKDTLMISRTPEVTCVVVDVSHEDPEVKFNWYVDGVEVHNAKTKPREEQYASTYRVVSVLTVLHQDWLNGKEYKCKVSNKALPAPIEKTISKAKGQPREPQVYTLPPSRCELTKNQVSLSCAVKGFYPSDIAVEWESNGQPENNYKTTPPVLDSDGSFFLVSKLTVDKSRWQQGNVFSCSVMHEALHNHYTQKSLSLSPDYKDDDDK

SEQ ID NO: 393 - protein, 447 aa, Artificial
  An artificially generated sequence
QVQLVESGGGLVQPGRSLRLSCAASGFTFSNAWMHWVRQAPGKGLEWVAQIKDKSQNYATYYAESVKGRFTISRADSKNSIYLQMNSLKTEDTAVYYCRYVHYSASYGVDAWGQGTTVTVSSASTKGPSVFPLAPCSRSTSESTAALGCLVKDYFPEPVTVSWNSGALTSGVHTFPAVLQSSGLYSLSSVVTVPSSSLGTKTYTCNVDHKPSNTKVDKRVESKYGPPCPPCPAPEFRGGPKVFLFPPKPKDTLMISRTPEVTCVVVDVSQEDPEVQFNWYVDGVEVHNAKTKPREEQFASTYRVVSVLTVLHQDWLNGKEYKCKVSNKGLPSSIEKTISKAKGQPREPQVYTLPPSQKEMTKNQVSLTCLVKGFYPSDIAVEWESNGQPENNYKTTPPVLDSDGSFFLYSKLTVDKSRWQEGNVFSCSVMHEALHNRYTQKSLSLSP

SEQ ID NO: 394 - protein, 447 aa, Artificial
  An artificially generated sequence
QVQLVESGGGLVQPGRSLRLSCAASGFTFSNAWMHWVRQAPGKGLEWVAQIKDKSQNYATYYAESVKGRFTISRADSKNSIYLQMNSLKTEDTAVYYCRYVHYAASYGVDIWGQGTTVTVSSASTKGPSVFPLAPCSRSTSESTAALGCLVKDYFPEPVTVSWNSGALTSGVHTFPAVLQSSGLYSLSSVVTVPSSSLGTKTYTCNVDHKPSNTKVDKRVESKYGPPCPPCPAPEFRGGPKVFLFPPKPKDTLMISRTPEVTCVVVDVSQEDPEVQFNWYVDGVEVHNAKTKPREEQFASTYRVVSVLTVLHQDWLNGKEYKCKVSNKGLPSSIEKTISKAKGQPREPQVYTLPPSQKEMTKNQVSLTCLVKGFYPSDIAVEWESNGQPENNYKTTPPVLDSDGSFFLYSKLTVDKSRWQEGNVFSCSVMHEALHNRYTQKSLSLSP

SEQ ID NO: 395 - protein, 447 aa, Artificial
  An artificially generated sequence
QVQLVESGGGLVQPGRSLRLSCAASGFTFSNAWMHWVRQAPGKGLEWVAQIKDKSQNYATYYAESVKGRFTISRDDSKNSLYLQMNSLKTEDTAVYYCRYVHYAASYGVDAWGQGTTVTVSSASTKGPSVFPLAPCSRSTSESTAALGCLVKDYFPEPVTVSWNSGALTSGVHTFPAVLQSSGLYSLSSVVTVPSSSLGTKTYTCNVDHKPSNTKVDKRVESKYGPPCPPCPAPEFRGGPKVFLFPPKPKDTLMISRTPEVTCVVVDVSQEDPEVQFNWYVDGVEVHNAKTKPREEQFASTYRVVSVLTVLHQDWLNGKEYKCKVSNKGLPSSIEKTISKAKGQPREPQVYTLPPSQKEMTKNQVSLTCLVKGFYPSDIAVEWESNGQPENNYKTTPPVLDSDGSFFLYSKLTVDKSRWQEGNVFSCSVMHEALHNRYTQKSLSLSP

SEQ ID NO: 396 - protein, 447 aa, Artificial
  An artificially generated sequence
QVQLVESGGGVVQPGGSLRLSCAASGFTFSNAWMHWVRQAPGKGLEWVAQIKDKSQNYATYYAESVKGRFTISRDDSKNSLYLQMNSLKTEDTAVYYCRYVHYAASYGVDAWGQGTTVTVSSASTKGPSVFPLAPCSRSTSESTAALGCLVKDYFPEPVTVSWNSGALTSGVHTFPAVLQSSGLYSLSSVVTVPSSSLGTKTYTCNVDHKPSNTKVDKRVESKYGPPCPPCPAPEFRGGPKVFLFPPKPKDTLMISRTPEVTCVVVDVSQEDPEVQFNWYVDGVEVHNAKTKPREEQFASTYRVVSVLTVLHQDWLNGKEYKCKVSNKGLPSSIEKTISKAKGQPREPQVYTLPPSQKEMTKNQVSLTCLVKGFYPSDIAVEWESNGQPENNYKTTPPVLDSDGSFFLYSKLTVDKSRWQEGNVFSCSVMHEALHNRYTQKSLSLSP

SEQ ID NO: 397 - protein, 447 aa, Artificial
  An artificially generated sequence
QVQLVESGGGLVQPGRSLRLSCAASGFTFSNAWMHWVRQAPGKGLEWVAQIKDKSNNYATYYAESVKGRFTISRADSKNSIYLQMNSLKTEDTAVYYCRYVHYAASYGVDIWGQGTTVTVSSASTKGPSVFPLAPCSRSTSESTAALGCLVKDYFPEPVTVSWNSGALTSGVHTFPAVLQSSGLYSLSSVVTVPSSSLGTKTYTCNVDHKPSNTKVDKRVESKYGPPCPPCPAPEFRGGPKVFLFPPKPKDTLMISRTPEVTCVVVDVSQEDPEVQFNWYVDGVEVHNAKTKPREEQFASTYRVVSVLTVLHQDWLNGKEYKCKVSNKGLPSSIEKTISKAKGQPREPQVYTLPPSQKEMTKNQVSLTCLVKGFYPSDIAVEWESNGQPENNYKTTPPVLDSDGSFFLYSKLTVDKSRWQEGNVFSCSVMHEALHNRYTQKSLSLSP

SEQ ID NO: 398 - protein, 447 aa, Artificial
  An artificially generated sequence
QVQLVESGGGLVQPGRSLRLSCAASGFTFSNAWMHWVRQAPGKGLEWVAQIKDKSQNYATYYAESVKGRFTISRDDSKNSLYLQMNSLKTEDTAVYYCRYVHYAAGYGVDAWGQGTTVTVSSASTKGPSVFPLAPCSRSTSESTAALGCLVKDYFPEPVTVSWNSGALTSGVHTFPAVLQSSGLYSLSSVVTVPSSSLGTKTYTCNVDHKPSNTKVDKRVESKYGPPCPPCPAPEFRGGPKVFLFPPKPKDTLMISRTPEVTCVVVDVSQEDPEVQFNWYVDGVEVHNAKTKPREEQFASTYRVVSVLTVLHQDWLNGKEYKCKVSNKGLPSSIEKTISKAKGQPREPQVYTLPPSQKEMTKNQVSLTCLVKGFYPSDIAVEWESNGQPENNYKTTPPVLDSDGSFFLYSKLTVDKSRWQEGNVFSCSVMHEALHNRYTQKSLSLSP

SEQ ID NO: 399 - protein, 447 aa, Artificial
  An artificially generated sequence
QVQLVESGGGVVQPGGSLRLSCAASGFTFSNAWMHWVRQAPGKGLEWVAQIKDKSQNYATYYAESVKGRFTISRADSKNSIYLQMNSLKTEDTAVYYCRYVHYAAGYGVDIWGQGTTVTVSSASTKGPSVFPLAPCSRSTSESTAALGCLVKDYFPEPVTVSWNSGALTSGVHTFPAVLQSSGLYSLSSVVTVPSSSLGTKTYTCNVDHKPSNTKVDKRVESKYGPPCPPCPAPEFRGGPKVFLFPPKPKDTLMISRTPEVTCVVVDVSQEDPEVQFNWYVDGVEVHNAKTKPREEQFASTYRVVSVLTVLHQDWLNGKEYKCKVSNKGLPSSIEKTISKAKGQPREPQVYTLPPSQKEMTKNQVSLTCLVKGFYPSDIAVEWESNGQPENNYKTTPPVLDSDGSFFLYSKLTVDKSRWQEGNVFSCSVMHEALHNRYTQKSLSLSP

SEQ ID NO: 400 - protein, 447 aa, Artificial
  An artificially generated sequence
QVQLVESGGGLVQPGRSLRLSCAASGFTFSNAWMHWVRQAPGKGLEWVAQIKDKSQNYATYVAESVKGRFTISRDDSKNSLYLQMNSLKTEDTAVYYCRYVHYAAGYGVDAWGQGTTVTVSSASTKGPSVFPLAPCSRSTSESTAALGCLVKDYFPEPVTVSWNSGALTSGVHTFPAVLQSSGLYSLSSVVTVPSSSLGTKTYTCNVDHKPSNTKVDKRVESKYGPPCPPCPAPEFRGGPKVFLFPPKPKDTLMISRTPEVTCVVVDVSQEDPEVQFNWYVDGVEVHNAKTKPREEQFASTYRVVSVLTVLHQDWLNGKEYKCKVSNKGLPSSIEKTISKAKGQPREPQVYTLPPSQKEMTKNQVSLTCLVKGFYPSDIAVEWESNGQPENNYKTTPPVLDSDGSFFLYSKLTVDKSRWQEGNVFSCSVMHEALHNRYTQKSLSLSP

SEQ ID NO: 401 - protein, 447 aa, Artificial
  An artificially generated sequence
QVQLVESGGGVVQPGGSLRLSCAASGFTFSNAWMHWVRQAPGKGLEWVAQIKDKSQNYATYVAESVKGRFTISRADSKNSIYLQMNSLKTEDTAVYYCRYVHYAAGYGVDIWGQGTTVTVSSASTKGPSVFPLAPCSRSTSESTAALGCLVKDYFPEPVTVSWNSGALTSGVHTFPAVLQSSGLYSLSSVVTVPSSSLGTKTYTCNVDHKPSNTKVDKRVESKYGPPCPPCPAPEFRGGPKVFLFPPKPKDTLMISRTPEVTCVVVDVSQEDPEVQFNWYVDGVEVHNAKTKPREEQFASTYRVVSVLTVLHQDWLNGKEYKCKVSNKGLPSSIEKTISKAKGQPREPQVYTLPPSQKEMTKNQVSLTCLVKGFYPSDIAVEWESNGQPENNYKTTPPVLDSDGSFFLYSKLTVDKSRWQEGNVFSCSVMHEALHNRYTQKSLSLSP

SEQ ID NO: 402 - protein, 447 aa, Artificial
  An artificially generated sequence
QVQLVESGGGVVQPGGSLRLSCAASGFTFSNAWMHWVRQAPGKGLEWVAQIKDKSQNYATYVAESVKGRFTISRADSKNSIYLQMNSLKTEDTAVYYCRYVHYAAGYGVDIWGQGTTVTVSSASTKGPSVFPLAPCSRSTSESTAALGCLVKDYFPEPVTVSWNSGALTSGVHTFPAVLQSSGLYSLSSVVTVPSSSLGTKTYTCNVDHKPSNTKVDKRVESKYGPPCPPCPAPEFRGGPKVFLFPPKPKDTLMISRTPEVTCVVVDVSQEDPEVQFNWYVDGVEVHNAKTKPREEQFASTYRVVSVLTVLHQDWLNGKEYKCKVSNKGLPSSIEKTISKAKGQPREPQVYTLPPSQKEMTKNQVSLTCLVKGFYPSDIAVEWESNGQPENNYKTTPPVLDSDGSFFLYSKLTVDKSRWQEGNVFSCSVMHEALHNHYTQKSLSLSP

SEQ ID NO: 403 - protein, 450 aa, Artificial; identical to SEQ ID NO: 47
  An artificially generated sequence

SEQ ID NO: 404 - protein, 450 aa, Artificial
  An artificially generated sequence
DIVMTQSPLSLPVTPGEPASISCRSSQSLVHSNRNTYLHWYQQKPGQAPRLLIYKVSNRFSGVPDRFSGSGSGTDFTLKISRVEAEDVGVYYCGQGTQVPYTFGQGTKLEIKSSASTKGPSVFPLAPSSKSTSGGTAALGCLVKDYFPEPVTVSWNSGALTSGVHTFPAVLQSSGLYSLSSVVTVPSSSLGTQTYICNVNHKPSNTKVDKKVEPKSCDKTHTCPPCPAPEAAGGPSVFLFPPKPKDTLMISRTPEVTCVVVDVSHEDPEVKFNWYVDGVEVHNAKTKPREEQYASTYRVVSVLTVLHQDWLNGKEYKCKVSNKALPAPIEKTISKAKGQPREPQVCTLPPSRDELTKNQVSLWCLVKGFYPSDIAVEWESNGQPENNYKTTPPVLDSDGSFFLYSKLTVDKSRWQQGNVFSCSVMHEALHNHYTQKSLSLSPHHHHHHHH

SEQ ID NO: 405 - protein, 222 aa, Artificial; identical to SEQ ID NO: 48
  An artificially generated sequence

SEQ ID NO: 406 - protein, 222 aa, Artificial
  An artificially generated sequence
QVQLVQSGAEVKKPGASVKVSCKASGYTFTDYEMHWIRQPPGQGLEWIGAIDGKTPDTAYSQKFKGRVTLTADKSTSTAYMELSSLTSEDTAVYYCTRFYSYTYWGQGTLVTVSSASVAAPSVFIFPPSDEQLKSGTASVVCLLNNFYPREAKVQWKVDNALQSGNSQESVTEQDSKDSTYSLSSTLTLSKADYEKHKVYACEVTHQGLSSPVTKSFNRGEC

SEQ ID NO: 407 - protein, 219 aa, Artificial; identical to SEQ ID NO: 50
  An artificially generated sequence

SEQ ID NO: 408 - protein, 219 aa, Artificial
  An artificially generated sequence
DIVMTQSPLSLPVTPGEPASISCRSSQSLVHSNRNTYLSWYQQKPGQAPRLLIYKVSNRFSGVPDRFSGSGSGTDFTLKISRVEAEDVGVYYCGQGTQVPYTFGQGTKLEIKRTVAAPSVFIFPPSDEQLKSGTASVVCLLNNFYPREAKVQWKVDNALQSGNSQESVTEQDSKDSTYSLSSTLTLSKADYEKHKVYACEVTHQGLSSPVTKSFNRGEC

SEQ ID NO: 409 - protein, 219 aa, Artificial; identical to SEQ ID NO: 56
  An artificially generated sequence

SEQ ID NO: 410 - protein, 219 aa, Artificial
  An artificially generated sequence
DIVMTQSPLSLPVTPGEPASISCRSSQPLVHSNRNTYLHWYQQKPGQAPRLLIYKVSNRFSGVPDRFSGSGSGTDFTLKISRVEAEDVGVYYCGQGTQVPYTFGQGTKLEIKRTVAAPSVFIFPPSDEQLKSGTASVVCLLNNFYPREAKVQWKVDNALQSGNSQESVTEQDSKDSTYSLSSTLTLSKADYEKHKVYACEVTHQGLSSPVTKSFNRGEC

SEQ ID NO: 411 - protein, 219 aa, Artificial
  An artificially generated sequence
DIVMTQSPLSLPVTPGEPASISCRSSQPPVHSNRNTYLHWYQQKPGQAPRLLIYKVSNRFSGVPDRFSGSGSGTDFTLKISRVEAEDVGVYYCGQGTQVPYTFGQGTKLEIKRTVAAPSVFIFPPSDEQLKSGTASVVCLLNNFYPREAKVQWKVDNALQSGNSQESVTEQDSKDSTYSLSSTLTLSKADYEKHKVYACEVTHQGLSSPVTKSFNRGEC

SEQ ID NO: 412 - protein, 219 aa, Artificial
  An artificially generated sequence
DIVMTQSPLSLPVTPGEPASISCRSSQSPVHSNRNTYIHWYQQKPGQAPRLLIYKVSNRFSGVPDRFSGSGSGTDFTLKISRVEAEDVGVYYCGQGTQVPYTFGQGTKLEIKRTVAAPSVFIFPPSDEQLKSGTASVVCLLNNFYPREAKVQWKVDNALQSGNSQESVTEQDSKDSTYSLSSTLTLSKADYEKHKVYACEVTHQGLSSPVTKSFNRGEC

SEQ ID NO: 413 - protein, 219 aa, Artificial
  An artificially generated sequence
DIVMTQSPLSLPVTPGEPASISCRSSQSPVHSNRNTYLHWYQQKPGQAPRLLIYKVSNRFRGVPDRFSGSGSGTDFTLKISRVEAEDVGVYYCGQGTQVPYTFGQGTKLEIKRTVAAPSVFIFPPSDEQLKSGTASVVCLLNNFYPREAKVQWKVDNALQSGNSQESVTEQDSKDSTYSLSSTLTLSKADYEKHKVYACEVTHQGLSSPVTKSFNRGEC

SEQ ID NO: 414 - protein, 219 aa, Artificial
  An artificially generated sequence
DIVMTQSPLSLPVTPGEPASISCRSSQSPVHSNRNTYLHWYQQKPGQAPRLLIYKVSNRFSGVPDRFSGSGSGTDFTLKISRVEAEDVGVYYCYQGTQVPYTFGQGTKLEIKRTVAAPSVFIFPPSDEQLKSGTASVVCLLNNFYPREAKVQWKVDNALQSGNSQESVTEQDSKDSTYSLSSTLTLSKADYEKHKVYACEVTHQGLSSPVTKSFNRGEC

SEQ ID NO: 415 - protein, 219 aa, Artificial
  An artificially generated sequence
DIVMTQSPLSLPVTPGEPASISCRSSQSPVHSNRNTYLHWYQQKPGQAPRLLIYKVSNRFWGVPDRFSGSGSGTDFTLKISRVEAEDVGVYYCYQGTQVPYTFGQGTKLEIKRTVAAPSVFIFPPSDEQLKSGTASVVCLLNNFYPREAKVQWKVDNALQSGNSQESVTEQDSKDSTYSLSSTLTLSKADYEKHKVYACEVTHQGLSSPVTKSFNRGEC

SEQ ID NO: 416 - protein, 219 aa, Artificial
  An artificially generated sequence
DIVMTQSPLSLPVTPGEPASISCRSSQSPVHSNRNTYIHWYQQKPGQAPRLLIYKVSNRFSGVPDRFSGSGSGTDFTLKISRVEAEDVGVYYCYQGTQVPYTFGQGTKLEIKRTVAAPSVFIFPPSDEQLKSGTASVVCLLNNFYPREAKVQWKVDNALQSGNSQESVTEQDSKDSTYSLSSTLTLSKADYEKHKVYACEVTHQGLSSPVTKSFNRGEC

SEQ ID NO: 417 - protein, 219 aa, Artificial
  An artificially generated sequence
DIVMTQSPLSLPVTPGEPASISCRSSQPPVHSNRNTYLHWYQQKPGQAPRLLIYKVSNRFSGVPDRFSGSGSGTDFTLKISRVEAEDVGVYYCYQGTQVPYTFGQGTKLEIKRTVAAPSVFIFPPSDEQLKSGTASVVCLLNNFYPREAKVQWKVDNALQSGNSQESVTEQDSKDSTYSLSSTLTLSKADYEKHKVYACEVTHQGLSSPVTKSFNRGEC

SEQ ID NO: 418 - protein, 219 aa, Artificial
  An artificially generated sequence
DIVMTQSPLSLPVTPGEPASISCRPSQSPVHSNRNTYLHWYQQKPGQAPRLLIYKVSNRFSGVPDRFSGSGSGTDFTLKISRVEAEDVGVYYCYQGTQVPYTFGQGTKLEIKRTVAAPSVFIFPPSDEQLKSGTASVVCLLNNFYPREAKVQWKVDNALQSGNSQESVTEQDSKDSTYSLSSTLTLSKADYEKHKVYACEVTHQGLSSPVTKSFNRGEC

SEQ ID NO: 419 - protein, 219 aa, Artificial
  An artificially generated sequence
DIVMTQSPLSLPVTPGEPASISCRSSQSPVHSNRNTYIQWYQQKPGQAPRLLIYKVSNRFSGVPDRFSGSGSGTDFTLKISRVEAEDVGVYYCYQGTQVPYTFGQGTKLEIKRTVAAPSVFIFPPSDEQLKSGTASVVCLLNNFYPREAKVQWKVDNALQSGNSQESVTEQDSKDSTYSLSSTLTLSKADYEKHKVYACEVTHQGLSSPVTKSFNRGEC

SEQ ID NO: 420 - protein, 122 aa, Artificial
  An artificially generated sequence
QVQLVESGGGVVQPGRSLRLSCAASGFTFSNAWMHWVRQAPGKGLEWVAQIKAKSNNYATYYAESVKGRFTISRDDSKNSLYLQMNSLKTEDTAVYYCRYVHYYYYYGVQAWGQGTTVTVSS

SEQ ID NO: 421 - protein, 122 aa, Artificial
  An artificially generated sequence
QVQLVESGGGVVQPGRSLRLSCAASGFTFSNAWMHWVRQAPGKGLEWVAQIKAKSNNYKKYYAESVKGRFTISRDDSKNSLYLQMNSLKTEDTAVYYCRYVHYYYYYGVQAWGQGTTVTVSS

SEQ ID NO: 422 - protein, 122 aa, Artificial
  An artificially generated sequence
QVQLVESGGGVVQPGRSLRLSCAASGFTFSNAWMHWVRQAPGKGLEWVAQIKAKSNNYATYYAESVKGRFTISRDDSKNSLYLQMNSLKTEDTAVYYCRRVHYGAYYGVDAWGQGTTVTVSS

SEQ ID NO: 423 - protein, 122 aa, Artificial
  An artificially generated sequence
QVQLVESGGGVVQPGRSLRLSCAASGFTFSNAWMHWVRQAPGKGLEWVAQIKAKSNNYATYYAESVKGRFTISRDDSKNSLYLQMNSLKTEDTAVYYCRRVHYYYYYGVDAWGQGTTVTVSS

SEQ ID NO: 424 - protein, 122 aa, Artificial; identical to SEQ ID NO: 42
  An artificially generated sequence

SEQ ID NO: 425 - protein, 122 aa, Artificial
  An artificially generated sequence
QVQLVESGGGVVQPGRSLRLSCAASGFTFSNAWMHWVRQAPGKGLEWVALIKAKSNNYATYYAESVKGRFTISRDDSKNSLYLQMNSLKTEDTAVYYCRYVHYGAYYGVDAWGQGTTVTVSS

SEQ ID NO: 426 - protein, 122 aa, Artificial
  An artificially generated sequence
QVQLVESGGGVVQPGRSLRLSCAASGFTFSNAWMHWVRQAPGKGLEWVANIKAKSNNYATYYAESVKGRFTISRDDSKNSLYLQMNSLKTEDTAVYYCRYVHYGAYYGVDAWGQGTTVTVSS

SEQ ID NO: 427 - protein, 122 aa, Artificial
  An artificially generated sequence
QVQLVESGGGVVQPGRSLRLSCAASGFTFSNAWMHWVRQAPGKGLEWVAQIKALSNNYATYYAESVKGRFTISRDDSKNSLYLQMNSLKTEDTAVYYCRYVHYGAYYGVDAWGQGTTVTVSS

SEQ ID NO: 428 - protein, 122 aa, Artificial
  An artificially generated sequence
QVQLVESGGGVVQPGRSLRLSCAASGFTFSNAWMHWVRQAPGKGLEWVAQIKAKSNNYATYYAESVKGRFTISRDDSKNSLYLQMNSLKTEDTAVYYCRYVHYYAYYGVDAWGQGTTVTVSS

SEQ ID NO: 429 - protein, 122 aa, Artificial
  An artificially generated sequence
QVQLVESGGGVVQPGRSLRLSCAASGFTFSNAWMHWVRQAPGKGLEWVAQIKAKSNNYATYYAESVKGRFTISRDDSKNSLYLQMNSLKTEDTAVYYCRYVHYYAYYGVQAWGQGTTVTVSS

SEQ ID NO: 430 - protein, 122 aa, Artificial
  An artificially generated sequence
QVQLVESGGGVVQPGRSLRLSCAASGFTFSNAWMHWVRQAPGKGLEWVAQIKAKSNNYATYYAESVKGRFTISRDDSKNSLYLQMNSLKTEDTAVYYCRYVHYYYYYGVDAWGQGTTVTVSS

SEQ ID NO: 431 - protein, 122 aa, Artificial
  An artificially generated sequence
QVQLVESGGGVVQPGRSLRLSCAASGFTFSNAWMHWVRQAPGKGLEWVAQIKAKSNNYKKYYAESVKGRFTISRDDSKNSLYLQMNSLKTEDTAVYYCRYVHYYYYYGVDAWGQGTTVTVSS

SEQ ID NO: 432 - protein, 107 aa, Artificial
  An artificially generated sequence
ASVAAPSVFIFPPSDEQLKSGTASVVCLLNNFYPREAKVQWKVDNALQSGNSQESVTEQDSKDSTYSLSSTLTLSKADYEKHKVYACEVTHQGLSSPVTKSFNRGEC

SEQ ID NO: 433 - protein, 6 aa, Artificial Sequence
  Tocilizumab HCDR1
SDHAWS

SEQ ID NO: 434 - protein, 16 aa, Artificial Sequence
  Tocilizumab HCDR2
YISYSGITTYNPSLKS

SEQ ID NO: 435 - protein, 10 aa, Artificial Sequence
  Tocilizumab HCDR3
SLARTTAMDY

SEQ ID NO: 436 - protein, 11 aa, Artificial Sequence
  Tocilizumab LCDR1
RASQDISSYLN

SEQ ID NO: 437 - protein, 7 aa, Artificial Sequence
  Tocilizumab LCDR2
YTSRLHS

SEQ ID NO: 438 - protein, 9 aa, Artificial Sequence
  Tocilizumab LCDR3
QQGNTLPYT

SEQ ID NO: 439 - protein, 119 aa, Artificial Sequence [sequence omitted]

SEQ ID NO: 440 - protein, 107 aa, Artificial Sequence [sequence omitted]

SEQ ID NO: 441 - protein, 448 aa, Artificial Sequence
  Tocilizumab H chain
QVQLQESGPGLVRPSQTLSLTCTVSGYSITSDHAWSWVRQPPGRGLEWIGYISYSGITTYNPSLKSRVTMLRDTSKNQFSLRLSSVTAADTAVYYCARSLARTTAMDYWGQGSLVTVSSASTKGPSVFPLAPSSKSTSGGTAALGCLVKDYFPEPVTVSWNSGALTSGVHTFPAVLQSSGLYSLSSVVTVPSSSLGTQTYICNVNHKPSNTKVDKKVEPKSCDKTHTCPPCPAPELLGGPSVFLFPPKPKDTLMISRTPEVTCVVVDVSHEDPEVKFNWYVDGVEVHNAKTKPREEQYNSTYRVVSVLTVLHQDWLNGKEYKCKVSNKALPAPIEKTISKAKGQPREPQVYTLPPSRDELTKNQVSLTCLVKGFYPSDIAVEWESNGQPENNYKTTPPVLDSDGSFFLYSKLTVDKSRWQQGNVFSCSVMHEALHNHYTQKSLSLSPG

SEQ ID NO: 442 - protein, 214 aa, Artificial Sequence [sequence omitted]

SEQ ID NO: 443 - protein, 439 aa, Artificial Sequence
  H0000-mF18mN4
QVQLVQSGAEVKKPGASVKVSCKASGYTFTDYEMHWIRQPPGQGLEWIGAIDPKTGDTAYSQKFKGRVTLTADKSTSTAYMELSSLTSEDTAVYYCTRFYSYTYWGQGTLVTVSSAKTTPPSVYPLAPGSAAQTNSMVTLGCLVKGYFPEPVTVTWNSGSLSSGVHTFPAVLQSDLYTLSSSVTVPSSTWPSETVTCNVAHPASSTKVDKKIVPRDCGCKPCICTVKEVSKVFIFPPKPKDVLTITLTPKVTCVVVDISKDDPEVQFSWFVDDVEVHTAQTQPREEQFNSTFRSVSELPIMHQDWLNGKEFKCRVNSAAFPAPIEKTISKTKGRPKAPQVYTIPPPKEQMAKDKVSLTCMITDFFPEDITVEWQWNGQPAENYKNTQPIMDTDGSYFVYSELNVQKSNWEAGNTFTCSVLHEGLHNHHTEKSLSHSPGK

SEQ ID NO: 444 - protein, 219 aa, Artificial Sequence
  GL4-mk1
DIVMTQSPLSLPVTPGEPASISCRSSQSLVHSNRNTYLHWYQQKPGQAPRLLIYKVSNRFSGVPDRFSGSGSGTDFTLKISRVEAEDVGVYYCSQNTHVPPTFGQGTKLEIKRADAAPTVSIFPPSSEQLTSGGASVVCFLNNFYPKDINVKWKIDGSERQNGVLNSWTDQDSKDSTYSMSSTLTLTKDEYERHNSYTCEATHKTSTSPIVKSFNRNEC

SEQ ID NO: 445 - protein, 440 aa, Artificial Sequence
  2C11VH-mF18mP4
EVQLVESGGGLVQPGKSLKLSCEASGFTFSGYGMHWVRQAPGRGLESVAYITSSSINIKYADAVKGRFTVSRDNAKNLLFLQMNILKSEDTAMYYCARFDWDKNYWGQGTMVTVSSAKTTPPSVYPLAPGSAAQTNSMVTLGCLVKGYFPEPVTVTWNSGSLSSGVHTFPAVLQSDLYTLSSSVTVPSSTWPSETVTCNVAHPASSTKVDKKIVPRDCGCKPCICTVKEVSKVFIFPPKPKDVLTITLTPKVTCVVVDISKDDPEVQFSWFVDDVEVHTAQTQPREEQFNSTFRSVSELPIMHQDWLNGKEFKCRVNSAAFPAPIEKTISKTKGRPKAPQVYTIPPPKEQMAKDKVSLTCMITDFFPEDITVEWQWNGQPAENYKNTQPIMRTDGSYFVYSKLNVQKSNWEAGNTFTCSVLHEGLHNHHTEKSLSHSPGK

SEQ ID NO: 446 - protein, 214 aa, Artificial Sequence
  2C11VL-mk1
DIQMTQSPSSLPASLGDRVTINCQASQDISNYLNWYQQKPGKAPKLLIYYTNKLADGVPSRFSGSGSGRDSSFTISSLESEDIGSYYCQQYYNYPWTFGPGTKLEIKRADAAPTVSIFPPSSEQLTSGGASVVCFLNNFYPKDINVKWKIDGSERQNGVLNSWTDQDSKDSTYSMSSTLTLTKDEYERHNSYTCEATHKTSTSPIVKSFNRNEC
